United States Patent Application Publication US 2026/0137732 A1 - sequence listing, part 10

SEQ ID NO: 7 - DNA, 2711102 bp, Akkermansia muciniphila (residues 1,355,552-2,711,102 of 2,711,102)
  source 1..2711102: mol_type = genomic DNA
cgcttgaaaaaaagccgctcacccagtagtgatgttccatgcacattacagcaggcctccgcatttcccgtgcgtttattctcggcgccgggctgggtacccgcctgcgccctctcaccggcattctgcccaagccgctgattccctttttccatgagccccttattctgcattccatgcgccgatgctacgattgcggcatacgggagttcatcattaacacccaccatctggcggcagcctgggacaaggtgttccctgaacattcatggaacggctgccccgttcatttcagccatgaacccgtgctgctggattccggcggcggcgtcaaaaagatagagcccctggcttccgcggaagaaccgctgctggtggtgaacggagacatggcggccacatttgacctgggccgcctgctggaggagcatttgagccgccgccctcccgtaacgctggccctccgcacttccggagacaagaagaacgtgggatttgatttttcttccggcctggtgacggatatgaggcacgccctgggccgcgaccccggatcctgccaattcaccggcgcgtactgcatggagccggaaatattcggacgcatcccttccggggaggccgtttccattatccccctgtttctggattacatccgggaaggacgcctgcgcggcattctggcggacgacgggttgtggatggacatgggaacaccggaaacctaccttcaagctcatctggattttccatcccccgctccgcgcatccacccccaggccagggtgtccccccgcgcctttgtggacagccattgcgtgataggccccggagctgtggtagaggacggctgccgcctgcaaggctgcgttgtctggccgggcgtatgcgtgccttccggcacctgcgcggaacgccggattttctattgttcccccaccgattactgacgatgctttttctgcgtctgcttcccctgatattgtgcttttccggcctggttcacgcagaacaccgcgtcttcaccaggaaggacggatttttgtccatgcgggacaagctgaacgtgtattttttccgttctgatacgcaccgcctgctggtaagggatgaagggagcgtcaaaacgccccggtacggctccctggacaaggccatgaggaaaagcccctgcgtggccggagtcaacggaggattcttcagcgcagacgcggagggaactcccctgggcctggtcgtccaggacggcaaacggctttctccgctggccacggggtccttcgctgtttccggtgtcgtttacgaaggaggcagagacggattaaccctggtccgcagttccgtgctgaggcgcatgaaaagactgccggccatgcaggcggctatccaaggggggccctttctggtggagaacggctccgccgtaaaagggcttaacgcgcagaagtccacctaccgcaccttcattgccacggacggcggcaggaggtggtgcatcggcgtttcctcatccctgactctgaaggagttggcatcctggctggcggctcccggggcattgggaaatttccgggtggaaacggccctgaacctggacggcggctcttcttccgccttctggtgccatgaaacaggcatttcctaccctgcgttcaaacaagtcaggaattatctgggcgtagcccccgtggaacgccggtaaactccgttctccacgggaccatggacgcgtttccctgcgcctatcctgcgcagcaacagagccgcgaacatcaggaaacaaaccaggacggcccagtcgcccagcatggcgtacagggttattttcgtacagcccacaggcaatgtggcagccatcacccctctggtaaacggtgaaccggaggaatcccgcaaatccgcaataaccgcgccgttgggggccagagccacgcttacgccggtattggcggcacggaccatggcacggcgcagctcaatacaccggaacgccgcattgcgccaatgctgttcgttggcgcaggaacggttgaaccacccgtcattggtcacgttcaccatcaactggggctcctgccggatgaagcggcgcacccagcttcccacaacatcttcaaagcagacaagagggatgacccccaccgtaacggagcttccgggacggatgggcacgggaacggggctggaggaacacccgggcgtataattcagtcccatggcggttccggcggaagcctcaaaggctttttccagaaatgggaatgtttcccgcatagggatgtattcgccgaaggggaccagcatggccttggcgtgcggccgggctgtggaataatccccctcaaagacggtaaggcagttgtaagcccgcgccacacgcccatcatcagacagatagatatcatccgtgcccgtcagcagaataaaattgcatatcccgttccggagagcctggacgtaatcttcttccgcgctcaaaaagttgacattgtcctgattggagaagcgttctcccgtggcatcacggtaaaacgtggaaatggggaaggaactttccggccagattacccaggccggcatatccagggaggcttccgcgccgtctttgaccgcctgttccagagcgcggttttgaagatccagcattccctgttccgtcatgtccagcaaagcccggtaaatgttcctccggttggccgggtcccatttttccttctggctcagattcagctgcacggccatgacgggaacggtgaatctgccgtctcccgtggcttcggcagactgggcggagtaacgggccgtccagatcacgccagtgacaaacatggttaaaagaaccgccaccagtatgaaaaaatcccagggaacagtgcgcctgccttcatggataatcatggttccggcccggcggcaaacgcgccagagccagacggaaaaaacggccggaataaaagccagcgccgttactccaagatattccgcccactgggccagaggattgccgtaaagggccacgcccagattgttccagccgaagcccggtatcagccagccccgcccccattccagacatacccataaagcggcgcccgccagagcggcggaagcgctgggcagtatgtcgcccagggcccaggttttccaggcggcccggcgttcctttgccttcagcctcgcatcgggcagcggccgggcgtccggacggaagaacactcccatgaccagagcccagaggccgggaaacaggcctccgtaaaaaatcatcaggggaatatagcccagcgtgctgacttcattgacccaccagaaggaaatgccgtaaaatactaccccaaacatccagccatacagggtgtatgccagcattccccttttcccctcccgcctgcggccgtaccacagggctgtcagcagaggcaggaaccctatccatacgcacccgccccagtccaccgggataaaggcgcaggccatcagaattccggaaaaagcggccagcagcagccctgcccacacgggcaggagacgagggagggaagcaggtgggatattcatcgtgaaaagccttttattccgggaacgggaatgccgccattgtcccccatgctgactcattcctgcaacaaaaaagattgcaaaatttactcaaatgcggaaatagtgggcgcagttcatacaacccatcatacacaatggcagatatcgacgaaaaaacacctctaaacgtccccgggaaattttacgtggacagttcctgcattgactgcgacctttgccgcgaaacggctccggaaaactttggacgggatgacgatgaaggagtatcctatgtcaagaagcagccggacaacgacgaagagctgagcgcctgtgaggaagccctggaaggctgccccgtggaagcgattggcaacgacggcgaataatattctccatatattattttaatcgcccggggctgttggcattcaacgctccgggcttttattttcccccatgtcctccccttggtttccctacacgccggacagagaccgtccggatccccacgcctcccccgtccggtatgattatctttcccgtgacgaacaggaggtgaggcaggcgctggcggactggttccagatatcccccgccaccagtgaaacacgtaacctccatacggcggaatccctgctgggggatattctgtccaggcttcccctggacggcgacgggatggatcccgaattgctccgggcaggatggctgaaagctgcggggccattcctgggccagcaatccaaccttctttccattgtcaagggagtggccaccatccaggtgcttcaaccagccatgcgctaccatctccagcagtggcagggagccctgctgggaaaactgaaggaccagttcggcaaggacgccgttcattccatccgcatacggataggataattttatactgcgtaaaatgttttcttttgcaatttccctgtttctttgaaagatcattcatcatccacgtgtaatatttgccatgcgattatccctttccgcgcctttgctggcttccggcctgatgctttgttttacctcctcccatggagactggacatccccgcaccctctccagcaggaaaaagccgctccggtcccactgattcccttcccgtcccaggtggactggaaaacgggaacatgccctaaaaaggctcccgtttccgtgaaaaaaaacgcgtccctgtctaagacgctgggcaaggaagggtatgaactgcggatccgccccaacggcattctgattaaggccgctgacgatgcgggcgttttttatgcccacagaacgctggaccagctgggagccaggggagattacccgtgctgcgacatcaaggacagccccgcgttcgccatccggtgcttcatgcatgacgcaggccgccatttccggactgttgaaacactcaaggcggatattgatgaaatggcccggctgaaaataaacgcttttcactggcatctgacggattaccccgcatggcgcatccagtgcaaaaagtaccctgttttgaatgatccctccaagaggattcagggacgggacgttaacggcacctactcctacgaccagatacgggacttattccgctacgccagggagcgccatgtccagattattccggaaatcgatatgcccgggcacagcacctattttaaaaactgctttggcttcccgatgcatgatcccagaggcatcaacattctggaagaactgctggaagaattttgcagggaaattccggcggaaatgtctccctaccttcatatcggagcggatgaaatccgcattcccaacggaaagcagtttgcggaccggatggcggccaaggtcaaatccctgggacggcagcccatccaatgggcgggcaacaatgacctgcctgtgtccggagacagttatgcccagctgtggaatgatgaaaattccgtaggcctgccggatccagccaggcagaagaatccctacttcgactccacggcaggatacgtcaattcctttgaccccggcattctggtgcgcaggaatttcttccgccagccctgcggaacagccaggggaaacaaccattccctgggcgtcatccagtgtctatggccggatacccgggtggagaacaaaaaaaacattcctgtccagagcccccagtggcctgccatgttcgccatggcggaacgcagttggaaaggaattccagaggatggttcccgttttgccggcagtctgccggaaaagaacacggaggcttatcaggccttctctctgtttgaaaaacgcatggaagccctggccggaagcaggcctttcccttactggagggattctttcgtggaatggacggtattcggccccgttccgcaggacaggcaggaagaagtaagaaataacctgctggcgggcaaatctcccgcaggactgtcttccgtccagacgcgaggaggcaatttgtatttccgtacccgtgcgggtgcggagggtctattttccaagacaaaaccggggaatacggtctgggcggagacgacgtttcactcgcccgtggagggcaccatgcacgctatggtggggtttgacgctccggcccgttccacacggcgctgttccggagtaccggctgccggggagtggtcccagtgcggcaccagaatatgggtaaacggcaaggaaatgaaaaatccccagacttacaaactggcaggccaacggcgttacgaaaagcatacatggaattcgcccgctaatgagataccctttgacaacgaggaattctggtgggcccggcctcctgttccctttcaagtgaaggccggggaaaacaggatcctgatagaacaaccgtacacaggagaattccagtcgtggggagtcagcttcattccggtgaaaaaagcgggagaccgctggattgccgacccaagctattatgccaaacccaggagagagaaacaggatgacgtctctccggtgccataaaagtaaacatggaacactcccggcggagctttccgtccgttgttccaaaggtcattttcccccgctcatcaggacgagggaacgggggaaatagcgtttgaggaatacgtaaacgctccgcgccatcatgtaaaccgcgggaaccaggcaccaccacgcccaggcaggccatggggagggaaaacagctctctacgcccatcagggctatcagaacaaaaatatgggaacaatacacgaaaaagctgccggacgcccaccgggccagcttttccgaccagccggggctgacggcctttacaataattccgaagctgaggaaggccagaacaatcaatccgggaaaagagtcgtccgcaatcaggaaagagtccgtacagcttacccagacaagacccacggaggctaaaagaatggaaccatgcacggcaaggggcatgttgccccagcggttcagacagcccggtgcggcggacgccagcataacgccgagcgcaaaatccccaaacatgtacggactgggccatgccagggagtcgtcccaccggtgcagaaacaggcaaaacaggccaaaggcgtaaagagctggacggaaacgggagagcaaaaacgcagccagggtaaacatcatcaagtctctcaggaaccacatcggggtcagcatgggacatgttcccagcccaaacacggaagccagagaaccaggggcaagaggcatgcccgccgccagccaataggccgcgcaccagaaaagataaggccgcagcaaaaccagcaggcggcgccccgcccacgttccggccccctgttcatcaaggccggaggcggaaaaataccccgccagcaggaaaaacgtcgccagcgccggaccaatcagccattggttgggaggaaaccccatggaagggacgtgctgcatgataaccaccagcgtcgccagcagccgtgcaatctccacccagggcaaacgagggtgaatttctttaccggacgcggaggagacggtcatgacagccccattctggatgattgttttgaaaaagcactattttttattgattttatagacgaaaagcggccttatcaaccttcacaggcatcgtattatggaaaatacctgaaaatgatttttttctcatattttcatttatggctttatatttccatatgggaaataacacgcattccgagcgcaaggctgcatcaatacacactcccgcactggatattcccggattttgccgaaacagctgctgccatattgcagtgctcccggatggttctcccattgcaattccgtattttccattcatcaatgccgtatgtcgcgaacgcctccccttccctgcccgatgattcgtaaaatcatcagcggctcctttggggaatcagggctgaagccgccgcaaggacctgaaggcccacaaaaaggaaaaaccagaaccagccgccttccacaaaaccgtaagagtgcaggccaatccccatgaggttgacaccgaaccacccccaggctgccacgatatttccgagcgaggcaagaacgaggaagccttgacaggaacagacgtgtaaaagtcgggcatggagggagcaggagcaccaaaggagtgtcattaacgcaccgttttctttagggtcccacccccagaaccgtccccagctcatgtcggcccagatgccgccgagcattgtccccagaaaacagaagaagagcgccacgagaaggatgcgatagactccgcaggccccggctttcagccccttttcaccctgtccgaccgaagaaacgggccaccagatgatatgaggctaaaaacccggcaaaaaaaacacttccgtagcctatcatgatggtcattacgtgcatggtgagccagaaattcgaattgagaacggcacgcatcatgcccatggtatcgccgctgtagggcaaattcatggctaccaagagtgatagaaggccggaagcgcaggcgatcgcggcaacaggaagctgacggcggaggatataaagcgtcccgccgaataatgaggctaccgcgcccgcaaagacgaccgaggaatacaaattggttaccggggggcgcgattgaatgtacatgcgggccgcaatgccgaataaatgccataataccgccatacacaggaagaccgtcgcaaaatgcagcaatgtcttccgccgcttgagaaacagagagaccacgaaacaaaccaacgacatgccgtagagaaggaagcctcccaagaagggttcgatagcattgacgcaatgctcgaaatgcagtttgaaagaatccatgggcagtattgactccaattccccagaaagttgacgcagagtctctgccgcagtagattcatctccggcagcataggcatcgcaggctgcggcataggctttcagggcggtccacccggcgggactgagatttttttcgagcagagcggcagccggggtcaggtagcttccctcatgagggattactcgcagggccacattcggatccgcttcttctacctgcacaagagcctggaggaattgaaaatagcgattggcacggtaaagccggtcaagcgagggatggcgtttttcacgttcagcggcttcaagctctgctgaggcttcggccatagcttcatgccatgcatcaagcgtccccaaacagcccgatgtcccctccaggcggagagcgagcgcaacgccggcctgctcataaacggcgagtgcgcccagtacggcttccgcggcatgggcctgaggagaatttccccgcagagagccgcgcagcaggccagccttctcaactgcatcggcataggaaaaataacggcctcgtccgccaaggaattcgaccatatccctgttatccgaacgcagaaaaggttcgccggccatttttgccgggctggcgtttaatgccagcaaccacttcaccggcccggtccgagagcctccaagattcaccgacgtgcggccgcttgccaatttaagggaatccgccgctgcgcttgaaaccggcatcactcgtccagccttcaggcatggcagcgcgccgggtgagggcgcccctatgccgtcaaatgaggaaaaagaactaccaatcctctgaaaaagaggcgataacgcaatcgcaagagcaacgaaaaacgccgtaaataaagtaattttacactgcatgtttttttcgggcacgcagggttgggagaaaaatcagcagcatgcccgcaaatacgccgggcaccgatatccacggaaaaaagcgcaccggattgcgtacggctgtgactacactcgtgcggcccccattggcgtaactgctctggtaaaaaatccagccgccaaaggagaccggagcattcatgcgaataaccgtttccgtgctttccccgccgcgcataaagcaaacctcgcttgaaaagctgctggggatatcgcttcccgtccatgtccgggcatcaaattttttcagctttactgaaaaaccaagggggatattttttcttccattcccttcgcctgccagtatttcgtgtgagacctcacctgcatccagaacgagtattccctccgtacgcagaaaatactgcaacgcccccgccaaaatcagcactaccagaaaggcatgcgtgaggatcaagcccacgccgcgcagtgtgaagcgcgcacgccggaaaacagacgccgaaatattcagtacggctaatgcccctacgccggcgccgccgatcagaggaatcatcccgaaggaaaggcagccccagctttcaaaatacctggcctgtacagcggaaacaccgacagaccgcgcctcaagagtgccgagaaaaatgagcagcacggcgtaagccatcagcacgcacgcgagacggggagatgccatccactgcaaaattttcttcatcagcagatactgaatgaaaaagggccgcacgcctctgccgctccagccgggaaacggaagcatagggtcgtgcggcctgcttcgtgatgaataaagacggaataattattttttgtccgtaaaggcagcttccacttcagagatcatcttgttcagagaaatgatgccgccgccggaaagataccatacctgcgggtcaagcaggatgatggcgccgtttttagccgccttcgttttattcacaagcacattgttgaggacattcggatttttggccgagcggccgatagctaccgaacggtccaccgcaaagatgatatcgggattgagcatggcaatgtattcataagtcacctgctgcccatgaacccccaccttgatgtttttatcagcctgggccactcccagggcatcgtgtaccaacccaaagcgggaacccgaaccgtaagcgcttaccttgccgtcgttcgtaaggagaacgagagctttcttgccgctggcctgggccttgtccttcgtacgggttacggcttcatcaatgtttttgacggcttcggctgccttttcgggcacgccgaacacatcacccagaagcctgatgtttttcttggcttcccccagctgatccttggccagagtatcgaccaggtaaacgggggcgatggaggaaagtttttgataataatcctgctgacgtcctgaaataataatcaagtccggcttgaacgcattgatggtttcaatattgaattccttaaccgttccaagatccgtatattgttctccggagaatttggagaggtaaggaggaaggaattttttgggtaaagccagcgcgggagtgacgcccagttcaccgatggtctcaagcgaaccgtagtccagcacggcgacacgtttcggattgaccggaagctcgaccgtgcccagcgtgtgcgtggcggtgatcgttttggcttcatctgcggcggccatggaaagaccgggaagaatcaatgcggccagaaatgcggtgattgttgttctcatattatttgttgttgtttgttgttttgggaatttaaggaaattctattcatagtatacgcatatctttttatcaccatagggttctatggcgatatccataccgtaaatatcgcgcagcacatctgtccggatgatatcttctgtcggcccttgatggcacaggactccgtccctgaatgccaccacgtaatccgcatagaaagagacaaagttaatatcatgaattacgatgcagatcgtcttgccctgctcccgcaccagggaacgcaacagtttcattatgcgcgccgcacgatgcatatcaaggttgttcaaaggttcatcgagaaagatgtacttcgtgtcctgtgcaatggccatggcaatataggccatctgcctctggccgcccgaaagctcatcaaggtagcaatggcgcaaatcggaaatctcggtaagttccaaagccttttcgatttgcagaaaatcctgattttccaggcggccgcgggaatgagggaaacgtccgaagcgaaccagttcctcgaccgtgagccgcgccggagtatggagggtttgccccaggatggtgagggttttggcaagctcccgggaatcccatttcctgagttccctgccatcaatggatacagagccttcggtgggttccagaaggcggctgataatgttgagcatcgtgctctttccggcgccattgctgccgatgaaggccaccatccgatcagagggaagcctcgtgctgacgtgcctgagcacgaaggtttcacggtattttttggaaatgtctcgtatctcaatcatatacgtttaattttcatgatcaggtagataaagtaaaccccgccaacgaaattgatgattacgctcaggggcacggagaagttgagccaccgttcggtaagcagcatgccgaaagtcaatgcggctacgcccacgagagccgtgccgggcatgaggacgatgtggcggtaggtcgggaatatgaagcgggcaatgctcacgatgagaatgcccaggaaagtcaccggccctacgagcaccgtcgaggccgaggccagaatagagacgatcatcagggagcgcagcaccacccatttgtagtttacgcccagcgtaatggccgtggagcggcccagcgtaagcacgtcgagcttcctgaggtcgcaaaccagccagatgaccgccgcggcgatcacaagccccgccgtaagcagcagttcttcattgatgcggttgaaactggcgaaaaggcgcccctcaagtatggcaaattcgctcggatctatcagcacctgcatgaagttcgacaagcctccgaaggttatgccgaagatcatgcctaccaacaccacaaaataaatattgccgccattctgtccacggaacatgtagaaaaaaatacccgtagatacgcagaccatcagcagcagggctcccatgaaacagagcgggctctgcatggtcgtcaattgtgtgctgcccacgaagtagagcacgagcgtctgcagtaatacgtagaggttatccagccccatcacgctgggagtgaggatatagttggttgtaatcgtctggaagacgactgaagacagccccacggccgttcctaccagcaccagcgcaataacgatgggaatgcggcgggccatgttaaagtcccacgtttcgggtgtcatcccctgaaagacatatacgagcgccagtcccacgcagagcagacccagaatcaggaaggccgggaacgcgcgacgccggccggcagcattgcggaaggcatcatctttttgatgttgaatggaatcaggcatacgtttttctatggaagagcatggccagaaatacagcaccgccgaccacgctcaggataacgccgatggggatttcgaagggggcgataagcatgcgccctgccacgtcgcaaacaagaacaagcatggcccccagccaagccgtatcaaacaagattttcttcacggcatctccccggaaaatgctcacgatattgggcacgatcaacccgatgaaggggaggtagcctacctccacaatcgtgattgagctgatgatggatacaatcaccagtcccatgcgcatgatgcttgcgtggttcagccccaacgccaccgcggcatcgcgccccatcccggcaatcgtaaagagatcggcataaacataggccagcagcatcaacgggatgctggcatagagcaattcataattaccctcaatgacaagggagaaactcccctgcagccatgatgccatattctgtacaatatcaaactggtaggcataaaaaacggctccggcattcaccacgccgcccagcatgattcctatcaggggcaccagaatgacattctggtgccgcacgcgcgcaatcaccgccagaaagcatgaggtgcctatcagagaaatcacgaaggcggcccccacgcgccaaatgggagaggctccgggcagataaaggatggcgaccattaccccaaagcggcaccactccatcgtgcctgccgtggtcggcgacacgaagcggttattggtgatgcgctgcatgatcaagccgctgatggccatgctgctgcctaccacgagaatgctgcagaggcgcggaatgcggctttgcaacatgatctcccaccagaactgcagctgctcgccatccatctgccacaggtcggacaaggacacttgagctgccccaataaagagcgaataaaaggcaaggccaagcagaaagctccactgaatgattctgaatgccattttctcaggctttcaacacggctgcatcaagttccatttcaaacaacagattgtcccggcacacatcggcctgtatgccgatgcagggcatgatggcgaggccgcggcgcagagctattttttcgtagtgaggggcataatccttgtctttgaaataggctacggagcggacgacatccttccagcccatgccgcgtgatttcaggatggcttcaatcacgtccagcgagagctctgtttgtttgtcgatatcgccgagatgtacggattcgccgccaggggcaatgctggccgtgccggagacgatgacttgccggaagaaagggtgatccacttctaccgcacggctgaatgagctgcggtaatcctgagccgaacattgcagaggcgaagggatatcttttaccgtcacacggtcgcccttaggccgaatggcaaatacgcgggccgacaaggccgcatgttcccgattgccggaaccaatccccgtactggccggaaccagacgatcaaacacgccgcggctttcaaaaaatgtgtcgcgggcgcggttgaactcttcataccagtccagcaggcggttgttgtaaaaccatgtgcggaccacgtgggaaaaatccatgccggcccggttcagcgcttcttccatctgccggaatacatccaatgtctgctcggttcgtccggctgtccggtcgcggggcgacaaaccgcccaaaacggcatactcggcatattcatcctcataaaaaaccccggcggtgcggccattgaactcaatcgcccgggcatttaccccctccaccgcgcaaatttgcatgcctcgatagaaggatgcgcccgttttcgtacccaaaaaggcagtcatccccgccccgggcaccggggagagatccagatctgcgctgccgtacacttccgggccaatccaccgaagaccgtttttttcagctttttggagtaattcggcatgctcggccaactgcccaggttcgcttccggcaagcgtaacgaattgcagagatgcgccttcgccgcccagcgggagcgacttgacggaaacacctttgtttttttccaagttgcaggtcatgagtatattagtttttttaaagtgctttcaggaattgaatcagttggccgcgctcttcggcggagagatggcggaacatttcacgggagaattcgctttcaccgaaatgccacaggatagcctcttcaaagtcgcgggcgcgcaggtcatggaacatatctgtatgattggcggttttgtgcatcagcccccttccccagaggggcggcgtacgccagaaacgagaacgtccgcggttgatttcccccatatcgtgacgcagcatatccgtataggggcggatggtctggtttgcataaccgggaagcggcttatattcccccgttgtccattcaggcttgtggcaaccggcacaccccagtttattgaagagttcctgtccgcggcgcacgtcaggcctgtctaggttgcgggcggcaggcacggccagcccgcgatgccagaccatgaaatcttcatactgctgcattgagagttcctcttcctgcgggccttcaagaccgcttacatcaatgccaagttccttctgtttttcgagccattcgggcgtcatgtagatgttcggacggttcttgcgcgttacattcgtcacgttccaaagcgcattggcgccaggaccgttttccagtgtggcgcgcgagcagtcccacgtgaacttgccgaggcgccgggtgccgtcgggctcgtcaatccatttgccaggaatccccttcaccgggcctgtcatgctctgctggcgcctgtattcggcaataatatcctcgtcacggatggcatcaagcagccccgttccgtaaatgccgattgttgattcgattgacacgcggtaatcgaccggaagcggaagcaacggctcaatcacatctgccgtgggataagtcaacgtgccttccgtcggcttgcccgcattgtagggcgttccgtccgggtatttgtttccgtactggtcaacaaaatcatgccattctattttcacccccttggcataaggcacaaaaggaggaaccgctttcgtctgcagcatgcccgtgtaccccttaaccggggtgccatcgggattatgtacaaaggccagataaccgttgccgtactgcctgtcaaaattgccggtgcgctgtccgcggccataaccggggtggcaggccagacaggatgatttaatgtaagtggggccgagaccgccgaagcgattgcgcttcacgggtacgaagttcccttcaaaaataatttcgcccgccttgaaacgattcgtcaggccagcttcagtaattgccggcgattcctgctcaaacgctttactggtggcattaaacaccgttcccttttcaccgcccagatagtaagccggcccgggctcgccttctttcgtcctgagcgcggggggcgtgaaatcacggccgcggtttacatggcagctcacgcatgaagctgtcatgtattcggctttgatattgtcaaattttgatgcactcccctggaccggattaatcagtgcgcgtccggaaatgcggggatgtcccaaaacgccggcattccttgccgtgtccgggataaaagattgttcaggagccgcatccccagaacctccggaattcactattgcccaggcggccgctcccgctccgagcactaggacagccgcaggttttgcaaattgtcgatactccatgtgcattgatgattggcaggctttccagaaatacggcccgtggtacacgtctccgtcagccggccgacaatatgatattgcagcccagggccttgccgaccctgggcaatgcgggttaaattacttcacaagaagttcctgaaccttgtcgaggttttcggaaagttccttgcaactgtcgatgattgccttgagctgctcctttttgtcgaggtttttcaccagggggccctgtatggcgtcgaggctcttgaataccttggcgatagaacctttcacagcctggtcaaccttcgcggacttggcggctacgagaggggaaatcacattgtaggatttttctacgctctgtacgttgtggcgggagtccaccagagaagtgtagctgtaaagggattcacagtcggcagcgtcagccgtttcgtagggcttgcccacctttgaatcggctatttcgtcaataatgtccttgctgccgccgatgatttcatcaagcacttcagagtttgactcatagcggctgcctgcctggccagcttttttgaattcccccgcataggacttgccgggttctatttcagcttcttcaagaatcttggccttctcttcgctgatcttgtcagaacccgcccaccaggcttcaagcgtgatggcatcctcagcaatcacctcggccacagcggcaaggtaggaaagctgtccgggcgtcagatcggcggccttgcggggttgcccatctcggaacagcaggtattcggcagcatggaaaccgcgcgtttccgcgccgagggaattgcggacgtaggcggcgtcaatcgttacgctcttgctgtctgcgtttttggcgacggcgtcaaggttcgtggtatccaggggccaggagtccagcttcgggtcaaggttggcgaaagcagccggaccaaagaggaaggattccgaaagttcccacggcacgcgcgtttcaagaagaagcttccctgcttcagcaaccttggcatcggtaggagcagccttcagctctttagcggtcttggcgaatttgagagcgttatcactcatcgtcttgtaggtgggaatgacaagctcatccgcgtaggcggcaatcgccgcgctcgttttgtccaccttgggggaagcggccttggccgcctgagcctggctaccaaaagccaggattgtacttccggcgcaaaagccggccagcaacatgcgtttgtatgcgttcatggttttttattgataatgaaaacatccgtatcctcctcagggaggcatcctccaatccggcaggatttcatggcgtatccgccattttttcccgccggagcggaaaataataatccggccaaacgatgtcaattaaaaattagtttaaactaactttgcgacaaaaaaaccctcttgtggccgcatgccggaacatcggcatgttattgattcggaaatattttctgtttccgaatgcgcccaggagccgcctttcaccaaattccgagtttctccgcgacaaggctccttacctcgccaaaagatttcactgcgggcggattttccgtatggcctccaagaaacttctccatccagatcatatggtaccaacggccgaatttgtatccgcaccgatgaaatttccctgcaaattgataccccaaacgtttatggaactggacgctgtcccgtgtaagataggggtcctcagcttcacagggataagcaatgcacgcgtttaaattcaaaatattctgcatggagagaatcttttccagagctgcatacagttcccttcccgttcccatttttttcatgtcttcccgcacgtataccgtcgtttccacagcccagcgatacgctgcgcggtccttgaacactcctgcataggcataaccggaaatatcccctgccctttccgcaaccaaataggggtattttcccagtacgtgatctattcttttttcaaactccgtcactgcaggcacttcatattcaaacgtgacagctgtcttttccacatacggagcgtaaatttccagcagcttggccgcatcccgcctcgttgcaattctgattctgctgcttttcatttcggttgactgtgcagggcccctgagccggaagcgctgccgatcattctaatatttcacaagcgattgtcaatttgaggccgcccaagcacccgccatttccgggaaatatcatccgccgcatgttttccgccgttcccgttcatgaacgggaagaaacggggtcaatattcatttcaaaatcagagtaaaaaccgcattttttaccttgtccggtaccccgtgtccatttatggaaagccctcccgaaaaagtgaaaaaaggccggagtccatagagaatccggtcttttggaaaggataggatgccacttcgcggcgaaatccgtctcaggagtaaaaaccgatgtccggttcccggtcccgccgcctgcgtttaaaatacggattgcggtagcggtggatgcatttgccggaactcccaggggtataatgaagaggggccgcctccttgacggcttcacggctcaatatctccacaaaatccttcaaggacatttccagatctgcatcgtggcatgccagcgcggcggacaggcgcactttgccgttgtcatagtccacatacatggcgaacagcgtggtctggtacaggtgccacggttccccgcccatttttccggactggtgttggctgatggcctccaacagccacgtcagcgcatgttccagttccagattgtccaaaacatcccgtataagagatgtttcgcggccgaaaacggccacgctttcctgttgtcttgccctgttgattttcatgtcttggttctcctttccggtttcccttgttaagcagaacggcggataattctgccgctccaattgttttggacactttttttcaacaggttgttcaatctgaattctcaactgtgtcagccatgaccactttcccaatgtacgggagttcccggtaatgcccatccaggtccattccaaaccccaccaggaaatcgtttccctgcgtaaaagccacgtaatcagcctcaaaaggcactttccggcaacagtgcttgtccacggctacagcagtgaggacttccttcacccctcttcttttcaattcccggcaaacttcatccagcgtagcacccgtatccagaacgtcatccaccaccagaacaggcacatcgggctggaaatccccgcaatccccctcccacgccacggaaccggaatttctcattccggcataactggaaattttgacggctttcaccgcaggccgggatttcaaatgcttctccaacatcgcagcgaaaggaagagcgccgttcagcagcagcaataaaatatagggttttcctgccatggccctgtcaatggatgcggccagttccctgacgcgcgcgcagatggcatcctctgcaatcaaaggagtgatggtgtaagtcatggaaacggagtatgataatgtttcctgtaagaaaatcaatccttaaagaaggatgaacggagacaaaacattcccggccgggctccagcaaattttacaagaagcaggactggtcttcatagtcaggaggcaacaaaaaagcgctctcaagattgtttctccgccccgatcggcagagaatgcggaggcgcatttaacggtggcttcccgccggaccgcatggtaaagtaaggcagaaatgactgattccccttccaagcgcctttttattctggatggaatggccctggcttacagagcccacttcgcctttttctccaatcccatccgcaattccaagggagtcaatacttccgccgtgtacggcttcgccaatacgctgctgggcattctggagcacgaacgccccacgcacatcgcggcctgtttcgacacttccgctcccacggcgcgccataagctttaccctgcctataaagccaaccgggaatccatgccggaagagttgagcgaccaaatgcccctgattttcagattgctggaagccatgaatattcccattctgcgctatgaaggctatgaggcggacgatacgataggcacgctggcacgcatcgcggacggtacggagggattccagacctacatggtttcccaggacaaggacctgggccagcttatttcctccacctgctttctgtggaaacccggcaaaaggggcaatgaccacgaagtgattgacctggcaaagctcaaggagcaatggggcattgaacgtgcggaccaggtagttgatattctggccctgatgggcgacagctccgacaatattccggggcttcccggcgtgggggaaaagacggccaagctgctgatcagagagttcggctccgtggaaaacctgctgtctaatacggataaactgaaagggaagcgcaaacagattgtggaggaaaacggggacatggcaaccctttccaagcaactggccaccattgaccggaacgttcccctgacggtgaccctgcctgaattggttaaaagagaacccagtccggaagaactgcaggcccttctccaggagttggaattccggtccatgcaggccaagctgttcgggaaaaaagcgccggagcccagaaaagcccccctcccggcagacgatttgtttgctcccgccccccggacggaacagccttcgtcggcgaaaccctccgcccctgtgtcgggagtacggcagaacggttcgggacaaatggatttatttgaggaacgccatttgaaaacggtagatgatttcaggcacgaatatattattgcagatacgccggaagcccgttccgccatggcagccgagctggaaaagtatgattcctggtgcttcgacacggaaacgacgggcctgaatcccctcatggacaacctgctgggcgtcgccttttgcgctgaaccgcacaaggcatggtacatgcctgtctccggtccggcggatctggaagcagtcaggccgctcctggaaggccccgcagagaagatagggcatcatctgaaatttgacctggaggttttgcgagccaacggcatccatgtcaaaggcccctttttcgatacattgctggctcatgccctgatcgctccaggcatgaagcacggaatggacgttctggcggaaaatttgctgcaatattccacgattaaactgaaggacattgccgctccaggagcaaaaaaacgggaactggacaccagcggcgttcccgtggaagtaatgggcaaatattcggcggaggatgcagatatcaccctccagctttccgccgtcctgaaaaggcaggtcaaggaaagcggcatggaaaaactgttccgtaccgtggaactgcccctgcttcccgtgctggcggacatggagttttccggcatccgcgtgcttccggaatccctggagaaggcttccgtcaaggtaggagccatcattgacggcctacgggaaagaattgaagaagccgcaggccatcccctgaatctgaattcccccaagcagctcggagatttcctgttcggagaactggagctggtgaagaagcccaagaagacgaagacgggccagttcgtgacggatgaagacaccctttccgctctggccccccagcatcccattgtagcggatatcctggcttaccgggagaatatgaagctgaagagcacatatctggatgcactgcccaggtatatctgcccgcgggatggacgcatccatacccaattccaccagatgctgaccgcaaccgggaggcttgcctcccaggatcccaatcttcagaatattccggtaaggacggaacaggggcgcctgatccgcaccgcctttgtccccgcctcagaggaatacaccatgctgtctgcggattattcccagattgaactgcgcatcatggcggctctttcaggagaccccgccatgtgcggagcattcagggaaggacgggacatccatacggaaacggccgcccgtgtgtacggcattccccgcgaccaggtggacgccgttatgcgccgtgcggccaaaacggtgaatttcggcattatttacggcatttccgccttcggtctctcccagaggctgggctgcccccgcggagaagccgccactttgattgaaaactattttacccagttccccatagttaaatccttcatggaagacctggttcacaaagcggaacaagccggttacgcggaaacgctattggggcgacggaggatgattccggaaatcaattccgccaacaagaccattaagtccgccgcggaacgtactgccatcaacacccccatccagggcacggcggcggatatgattaaaatagccatgatccatgtggacaaattgctgaaaggcaccagatcccggcttatcctccaaattcatgatgaattgctggtggacctgcacagggatgagttggctctcattcccaagatagaggaagccatggtcagcgcgctgcccctgcccaacggcgttcccattctggtggaagccaggacgggaggcaactggctggaagcccattaaaaaatattttttcaaaagactcccacggcgttccgcattccagaattcccgcgccttcccgatgccgtattttcccttccggccgtatcggtttccagtttgtggacgagttgtccctccaacgggaaatttttgaaaagaatgattcccccgcggcagaaaaatgggtgggaaaggatatccctttgaaaaaatgaattaaagaatcagagcgtcccctgactggaattccggaacggtcaccagggctctgccgtcttttaacgccactacctgcaccttgcgttcctgcattcctgacggcgtttttacctggatggagctgccgtccctgacggcggaagcgggaatccacgcggaaacgggaacttgaacgttgatggctacttgaagagccatattgacgggagccacttgccactcggaaacatgggaggcattcggctccagggaggcaatcaacacggcggaattgcttttggaatccagcgccgcatccaccgccgtaacgcggcccagccactgcagccgttttccattattcagcacgcaagaggcggtcagagccgtattcaccttgccctgctcatccctgggcaatgcggaaaattcttccagcggaacgggaatccgtatcatccgctcctgaagaggaattactttccccaccggctgcccggcgaccacgcgggcaccggctcccacagagcattccaccacctggcaggtatagggagcttccagcaccgtatcccggagggcctgttctgcttccgccacatacgcctccgcggcgttcagcctggcgtttacggctctgcgctgcggcacccggagcaccagttcggattcctttccgcttttggagacggagctgtatgtctttttgatggctttcagggcttccgcctgctccgtagaaacatccaggcgggcctgttccagttccgcctgagcgttcgccagccgggcgcggtattcaaatttttccaattccatcaggggggttcccttcaggacaatttcccccacattaaacaggggatgcactttgtccacctttccggaaacgctgggagaaagcatcgtcaggtaggaggcctttacgatgccgggcgcggaaatggaaagagtgttcgtctgcagccggaggggtgtctccgttcctgcgggcgcgcagcccctgtttccggaggaggaaaaagagacggacggctccgtcacaatagccgtgcctatcagaagcgccacaatccccaggccgatgcctatggaccaggacgttccctttttttgaggggcctcgctcatcaacagctccgggggaaacgcgtcccgttatttgggatattccgtctccatgatgtgggaataggcctccgccgtttccacagccacggtttcaatattcttcatcaactgggcaaactgggcttccgtgaggtccatgccttccagaacgaaggactggcggtaataaacatacccgctgttgggatccagctgaaaggcgccggccgtctggtccgcgttcagttcgctgaggataatgctgacttccacacggcggttttcaggaaccttggcggcaaaaagcacgtcaatgaccagcgtctccggacgttcaatcatggtgtacaggaggctcaccggggtgaacgtatcacaggggacgaatgcgatgcctgtcttaatgttgtggtcatcagcggaagtgatccattccgtttcttcccctctctttctgagaacggtgtacacacggtccaaaaggctgagatgctggttttccatattgaaaattgtttaacaggggggttgcttgcaaaggcgcatgcaacgtacgcgcccgtttactgaattcaagcttactggcatccttctgattcgtcaagctctcctgacgtaaagaaattgaaaaaacacgtatgcggacggcataaaaaatacagacgccgtccgaaagggcggcgtctggaaaaaacgcgtgcgccggaagttccggcttttttctgaggttctttttacaggatatccccgggctggtagcccgccccgtccggaaacctgtccgtcacttccttcaccatggagcggaatgcttccacctgggcgtcagccatgcccgtagcggaggaattggaatcaaaaatgcgctgaaggtccgcccggtctattcccaggcgcccgtcttccgccaggcggtccagcaaattgttttccatgattttcccggcgcgcaggtcattggagacagccacggcatgttccttgatcacctcatgggcggtctcccggccaatgccgcgcttgacggcctccatcaggatggtggttgtcatcaggaaaggcaggtagcggcgcaattccgcagccaccacggcctcatacacgcccatctggttcaacacggtcaggaaggtttcaaacaggccgtccgcagcgtaaaaggaatcaggcatgactacgcggcgcaccacggagcaggaaacgtccccttcattccactgatccccggccagcccggaaatcatcatcaggaagcctttcaaaatgacgtggaagccgttgacgcgctcgcaggagcgggcgttcatcttgtgcggcatggcgctggagccagtctgccccttggcgaacccctccgtggccagttcatggccggccatcaggcgcagggttttggcgaaggaggagcagccggaggtgagttccaccagcccggaaaccacggaaaagtccagagaacgcggatatacctgccccacattcatccacttggcagggatgcccaggtgggcgcacacgcggtcttccaattccagcacgcggccggcatcctgcccgaagagggaaagctggtcaagctgggttccaacggcgcccttcagtccgcgcacgctgtaacggtccatgagggaaatccaggcccccaggccgtgcacgatgtcttccccgaacatggcgacgcgcttgcccatggtcgtggtctgcgcggctacattgtgtgtgcgtccggcaatggtcacgtgcttccattgttcagccagggcgctcatgcggttcaacacggccacggccttgtcccggatgatttgcatggatttccaaatctggagctgttccacattttccgtcaggtcccgggaggtcatgcccttgtggatatgctcgcatccggccagctcgcaaaattcttctatgcgcgccttcacatcgtggcgcgtcacgcgttcgcgtgcgtcaatggagggaaggttcacctggtctttcacccgttcataggcctcaatcaccccgtccggaatatccagccccagatccttctgggctttcatcacggcaatccagaattcgcgttccagaatgatgcggccctctgcggaccagatggatttcatggcggcggaggcgtacctttcagccaggacattgggaatcacgctcatatcaaaatgtgtatatgcgggggttatcaaaaacggtgagccgccatgatcatgacggaagggaaaaaagcaagcactttcccgcagcttcacggattagggacgccggggaattccgccggccggcaaagcctcccttccatgcccctggtccggcattgcgcctccccgccaataaaaatttcaagaacaggcaaaaattcttattcccgaataacggaatcgcaacacctccgcttaccgccatgttccctcattcctttggcggcggctccaggccgtaccgggcataaccggagacgatttcctgaaggatggcggaaattttttccagggaacggacggggacgtattcatactttccatggaagttgtggcctccggcgcacaggttggggcacggcagccccatgaaggagaggtgggctccgtccgtgcctccgcgcacagggacgatttccggcctcactcccacggcttccatggccctgcgggcatgttccaccaggtgcatgtgcggaagtatcttttccttcatgttgtaataggaatccgtaatttccgcctttaccgtcccctccccgtatttacggttcagcagggccgcacattcctgcatgaattccttcttgcgctcaaaggcctccctgtcatgatccctgatgaggtactccgcagccgcccgttccacatctccccggagtgaatccaaatgataaaagccctcgtacccttccgtaaaagcgggattctggaacgcgggcagcattccctggaattccatgagaaccaggcaggcattcaacatcctgcccttggcgcttccgggatgaatggaagagccctgcaccgtcaccactgcggaagccgcattgaaattttcgtattcaatttcccccagggcgcctccgtccacggtataggcgaaatccgcaccaaatcgcgccacgtcaaaggcatccgttccgcgtcctatttcctcatccggcgtgaaggcgatccgtatctcgccgtgaggccgttcggggttcagcaggaaggaggctgccatatccatgatttccgccacaccggccttgtcgtccgcgccaagcagggtagttccatccgtcacgaccaggtcctggcccaaataatccgtcagttcgggaaaaacggcgggggaaagcaccattccctgttccggattgagcaggatgtctccgccgtcgtacgagcgcacgatgcggggcttcactccgctgccggagactcccggagccgtatccacatgggccacccagccgatgacgggaacattcccctccacgttggaagggatggaggcgtaaacaattccggaatcatcatccagttccgcctgcgctcccatgtccttcaattccccggccaacagccgggccagctccgtctggccgggggtggatggcacggtggcggaatccgcgtccgactgggagcccacggagacatacttcaaaaaacggtctaaaacggagatgttcatgggaaaaatcaaggattggcaagagtctaccacccgcccccgcgaacacaagcacaagacacggtttattcttgcgattcaggacggtgtgccgtatgtaaacaaagcttctccccatgatgactcctctcccccttggcattacccttgctttgtccctgacctgcggctccatgccccttctggcccaggggacgtatatgcccggccccatgcccgccacctccggaacaaagcaggatccaacggacatgtacctggaggcgttgaggctggtgacccaagccgcaggactggtggaaaaacgggattatataggagccatccgcctgacgcagcaggcggaagacaagttcggacgcctggctaagtcttatccccaatggcgtcccaacctgctgcaaacgcgccgccagctcaacagggaaaatctggaccagtggcagaagctggcccagcagcaggccgccgcctcttcttcatccggcccaggcctggagatggaacgcccggcctccgtgccgaagcgccccaggccaaaacccaacatagccctccctcccggctacaagggcgtggaattccctacccgtcccggagaatccctgatcaataccatcccgtccccttccgtttctcccggggcggctccggaagtggtggagagcaattacgaacgcatccgcagactgctggataaaaccaccatggagaacaaggctctgatccaggctctcaagcgcacccgccgggagcaggaggagattctggcaaaactggccgtggcatccgccggagaatccgtttaccgggatgaattgctcaaggtcaaaaagcagatggaggatgaaagaaagaccagcaacaagcttattcagactctcaccaggagagtggaggaactggaacaaaatgtcacctccctcagccaggacaaagcccgttatctggcgcagatcgccgatcttcagctgcagctcaaggagtaccaggacaagctggacaaagtgacggatgagaaaaacgcccttcagaaagaccgggaccaattggcggccctggtggagctcaacagcccggacaaaacaaaaaacctgttggaccgcaacctgacgctggcggcccagctcaaggatgcccaggacaaaatcgccgctctggaaacagccaaatccgattccgaagaacagcggaaagccaacctgaaagcgttggaagaggcgcgtgaggaatccgcagacctgaaacagaaactgattgccatccgggatgaaaacatcggctaccgcaaacgcatcacagagttgaataccaagctcatcaatgcggatgtggaactgtccaagctggaggccaatccggaaaaaagcccgcttcttctggaagaaaaccagctgctgcgctccaccatcgccaagcagctccgcatactttccgtgcaggaccagagccgctccctgctcatcagcacttataagcggctgcatcaggaaaatccggacacggcggaaatagcctccctgatggacaatgaagaagccatcaagctcactcctgcggaaaaacaaattgtcaacgccattgccagggataacaatatcaatgttcccctgacggatcagcagaaggaaaaaatcaacaagctggcgcaggccctctctgcggaacgcggtaaggccgcccagcttgcccgggatttggaactggcgcgcagccagatgaagaccaaagcggacaaatccgccagaaacgacaagaaacaggcggaagccctggcgcggacccagaaggccctggaacagaaaaacattcaggtggaggaactcacccggcagatggaagaactgaaaagccgttccgccgaacaggcccgcctggccgccatctccgccggaaccattactccggaccaggaaaaagcgctgaaccggagcatggaagccacggtacgccggaagctggaggcggaagccctggggcaaggcgccgcagaagccttcgccaaaaaacgctatgccgccgcggaacaactgtaccggactttgctggacttccagccggcccacgttccagccctggtcaatctggggaccattctgcttcagcgcaacaaggcggaggaagccattaaatttctcaaaaaagccacggaactggacgcctcctcctcccccgcatggttcatgatgggggtggcccaataccgcgccggggaagaccaccacgccatcgcctccctgacggaaacggtcaggctggatccggccaacgctcccgccctgctttacttgggcaacctggaaaccagcgccgggaactatgaaaaagcggtggcccactttgaaaacgccctgaaaatccagccggaatcaccggacgcgcacttcaacctggcctggacctattcccggctgggccgcacgacgcaggcacgcaaaagctatgatgcagccatccgctgcggaggcttgccggattccgacctggagcttgccattaccggaaccaccacccttccccgcaaaaaacaggctgcggaccagaatcccgcatccgccgcaaaagaggacggcccccagctggctgcggcaataagcgatccgtctgccattccccacgatgccaatgaagtgcctgctcatgtggcggaggacccaaatgcgcaggaaaagccgtccgccggtcccaaacaggtcgtcgtcagccaccatccggaaaccgaccccgtctctttggcggcccaaatgagggaaactgcccctgcggcggcatccgcacaacctccggcagaagccgcaactgccgcaacggaaacgcccaagccagaaaagcaggaacctccgcgcaggaaaagccgtttccgaatcggttcctgatggaattcttccctttcccagtaaataaagccatgtatcacgtttccattttaggactgggcctcattggctcacggattgcacgccatatggccggaatgggcgacaaggtcaccgtctggaacagaactccgcgggaagattttccggaagcggttcctaccccggcggatgcggcacgcgcttccaaagttatccagctctacctgaaagacaggaatgcctgtctggaagtgtttgaacaaatgagaggggctctgacaccggagcatatcattctgaaccattcaaccattgacttggcgaccgtcggcaaactctccctgatgagttccgccatcggctgcacgtatgtggattgcccgttcaccggctcccgtttgcccgcggaaaaaggggaactggtttactacgttggcacggattccaccacactggaccgcatacgccccgtgctggagcacagttcccgggacatcctgcacctgggcggcatcggagccggcaccgtcgtcaaactggtcaccaacatggtctccgccaccatggtgcagagtttgagcgaagccctggccatctcccaggcgtacggcatttcccaggaaatgctgggccaggccatttcccggaacgtcatcgcctcccctctggctgcatttaagctgcccctgatggcaaagcgtgacttttccacccatttctccctggacaacatgaggaaagacagtatttacgctcaggaacttgccgcagaaaaaggaatccacccgcctgttgccgccctggtttcctccatcatggggaagctgtgccgggaaggtcgcgcggaagaggatttcagctgtctggcggaacaattcgactaactttttccgttgatgaaattcaggggaacatgcgtctttctgttgacggctcttcttctgctccctgccggccggggacaggaacgaaaggagcctggcaatgattcttccgcggaagtgcggcagacggaagaagaatcagcatccgtccagaatgctgattttattgatgacgcctcggaccgtccagtattgcagggcagttccaatgtaaaccccgtcgttcccccttcaccttcggcaaggatcgccgccggaacggaggaacagcccgccaaaaggcagccgttcaccagcgtttccacctccaagcaattccacgtcaccgggatggactccctgctggccggggccatcgccacccgggcggatgccatacgcaccgcgctgctaaaagtcctcaagcagcctgacgaatggaaaaacggcatcaacatccgcctggtaggagagccgggaagccccgttccggccaaccccgtcctcatgcaaaccgtcattgtaggcaataccctctcctatagcattttcattcatctgggccacggcatcaaccaggacagtctgcgccgcgccatcgtctccaccctgctttatgaaatgatgctgcgcacggtggacccggaaggcctgccggacaacgtcacgctgcccccctggctgattgccgggttggaacaggctgttctgtggcacaataatgaagctgaccgtgccatgtattccaccctgttccagcagtccggaattatgactccggaagaaatcctgaattgccgggaaccggaaaaggaactggatgcgacctcttacgcggcctatcaaacttcctgtggagccctggtgctttgcctgctgaaccaggaaaacggtccggaagggatgaaacagcttctggaccaggctattctgggcaatgacgatcccagaaacctcatcaaacgccattttccgcagctcagcctgacccccacttccctccataaatggtggacgcttcagctttcccgcatggcgacgcctcccctgacggaaactctcacgattacggaaacggaacgtcatctccaggaagcccttaccctggtcaagtatgatccggatacccgcaccaccgtcacatttcccctggatgacctggaacaggcccgttccctgccggatctgaacaggcagctttccaacgtggctggcagcctgctcaacctcagcaggcgttcctttccttcataccggcccgtcattgtagaatatgccaagctggtggccctgatgcaaacagggaaagtcaacagccgggaagccgtccccaaaatcagccagcttcgggaaataagaaacctttccatgaaaaccgcccgccgcgtccgggactatatggactggtatgaaatcaacacgcggtccggaaccggcaagacattcgcttcctacgcggcagccgtgaaaatcctccgggaacaggaacagccggccaatacccctgtttcccgctacctggacgacattgaaaaactgtacaccctcccggccagggctcccgtgccctccctgcatgggaaggattaaggaattaaggaaaggcgttctgcggcggagccatcctgccgtccctatcaagagcgccgcacttctaaaaaacggcttcccgtgccgtgcaatgttctatcttcacggcatcacaaaatgccgatgagttctccccggaagccggatggtgcggaaatctggtgctatgaagagaattgcttgccggaacatgccaaatcaccggcagaaaccatgcatcacgtcatgaaccaatagactgtccgtcagcgttttgaatcattctctgcatcagcgctcatccccgccgcagaaacgcgcatttttttatgtggtcttttttgattcaggaggattcagggattgtctttcccaagatgatttgcaatcatcgccccgaattattttcatatcactatacaatatggacacgtcattgaaactccacggcctggtggccgccgtacatactccgttcaaggcggatggttctctgaatccttccagcgttgacgcccaggccaagctgcttgcctcccagggcatcaagcttgctttcattaccggcagtaccggtgaatcctcctccatgcagcttgaagaacgcaaggaaatctattccgcctggaaggaagcctccgccaagcatggcgtggaagttatcgcccataccggttccaacagcgtctgggacgcccgggaactggccgcttttgcccaggaatgcggattcgtggccaccagttcccttgctccctcctactacaagcccggcactgtccagcgcctggtggaatgctgcgctttcgccgcctccggcgcacccgacctgccctattattactatgatatccccgttctgacgggcgtacgcttcaacccggtggacttcatcaagctggccaaggaacagattccgaatttcgcaggcatcaaattcaccaatccggatctggccctgtaccagaccacgctgaattacgacgaaaccgtggacatcccctggggtgtggacgaatggtttacgggcgctctttccgtaggggccaagggcgccgtggggagctccttcaactttgctccggccctgtaccagaaactcatgaaagcctttgcggaaggcgacgtggaaacggcgcgcgactgccagtggaagtccgtgcagatgatcaatatcctggcctccaaagggtatatgggctgcgccaaggctctgatgggctggctgggcgttgatcttggacccgcccgacttccgcagggcaacccgaccgctgatcagctgaaggaactccgttccgaactggaaggcatcggcttcttccagtgggctttaaactgaaccccggaatctgaccgatatggctgcaactcttgatatgccctccctgggcaagttctaccgccgccagcttctggaagacgtcctgccgttctggtttccccgtgcctacgacgaaaaaaacggtggtctttaccactgttttgacgcagacggcacactggtggactccgacaaatccgtctgggcccagggccgtatggcatggatgctgctgacgatgtacaacagcatcgaaaagaatccggactggctcaaatgggcggaaagcgctctggaattcctgaaaaccaagtgcgttgacccaacggacggccgcatgttctttcatgtagccgccgacggtacccccatccgcaaacgccgctacgcctacagcgaatctttcgccgccatcgcctttgcagcgcacgccagggcgaccggcagccgggattccgcccgtgaagcccgccactggttcgacatcttcacggacaactgcttcacccccggcaagatggttcccaagttcaccggggaacgccccacgaccggcctgggcacccgcatgattacgctgaacaccgctcaggaaatgcgcaagtacctgggagatgacgacggcttttataccggctggacagaccgctgcatcaacgacctccgcaccctgttcatgaaacctgacatccaggcagtcatggaagtggtgggaacggacggctccatcatcgaccacttcgacgaacgcaccctgaaccccggccacactacggagggaggatggttcgtgctggaagaagcccgccatcgcggcaatgaccccgaactcatcaaggtgggctgcgacatgattgactgggcattcgcccgcggctgggacaaggaaaacggcggcatgctgtactacacggacgtgtacaacaaacccgttcaggaatactggcacaacatgaagttctggtggccgcatgatgaagcgctcatcgccatgacgctcgcctacaagctcacaggggaagaacgctatgccatccgccacgacatggtgcgcaactgggctttctcccacttccaggacgttcagcatggcgactggttcggctatctgaacaaggacggttccagggccaacaccctcaaggggagcctctggaaatccttcttccaccatccccgcgccatgtggtgctgcgcccactactgcggagccatttaagaagaaatcaaatgtttcctgccgggaggccattccgtatctacggagtggccgctttttatgccctcaacgcaggatgatatcctccgtccgcaccaccacatcgccgggatccagcatggcgttaatcagggaacagaagcggaatttgcctatatcttccgctcttacggaacattcccgaatgtctccgcgggacagcaggaaggcgcgcttggttcccgggagcaggaaagtttccggagtaatccaggaggccccgtccccgaacaccacgttgctgtaccgcgtatccgtcaccatcccgttccggagaatcagcgcttcttcgtcacagcccaaggccgcccctgccgccagaagccctgtccgatcctcccacttgcatgagtaatccagcccgggcatttccacacacgtcagcgtctgcacctgccggggacggtagggctcaaaggaggtgcggcgcacccttccccgcgtatcatacgtgatatggcatttgtaaactccacggctctccgggccgggacaggccgaaagaacggaagccagatcgggaacgggagctccgtccgaaccatgaacgccgatggaggcttccaccctccgctggtgccagggaagcaggcagggagcgccattctcccatttaacggtttcaaaaatcaaacggcacataaactttggctacagcttcccggtattcctcttccatccggctcatgacggtaatccctccaccgctcttgtataccattccccgctcatcctcctccatgaagcggatggagacggcggaatccaaatcccgcccgttgaaaaagccgaaaattccggtataaaaccccctctccatatcctccgcttccgcgatggcccggcaggtggcttccttgggcgctccggtcacgctcccggcgggaagcagcttcagaaggatttcccccaggcgggaacgccagttttccggcaacagccctgaaatttcggaactgcattgaagaatagagcctttggacgtttctacagggctgatatagcggtagcgttttaccttcacgccggttgccactatggaaagatcattgcgcatcaggtccacaatggtggcggattccctattctccttttcatccgtttccagccagcggcgcgcttcctgcgtagcggacggcgccgttcccttcatgggaaacgtggaaatggagcgcccgcgcaccgtgacaaacggttccggagaaaagcagacgcagccgcggccgtgcactccggaaatccgcgcgtccggccccagcagcatccggtaaggcgcgcgggcaaaccggaacagatggcgcagcgtcaggttggtttccacgggggtggacacgcataaattcagcaggtaggaatcccccctcatcagatggttccggacggaggcgaaggatgccgcataccgggacatgggctggggggatggaatgaaccgcagccgttccggaagcggagggccgccgtcctgacttcccatcgcgcccagcggcagggaaaaagcagccatgcgctccccctccgtttccgaaggttcaaacagcaggttatggcccatatcatgggagatgacaaaaaagaacggacattccgcacggcccagggcgttcatgcggctgatggtctgttcccgtgtgtacattgtcgggaattactctatcatgtgcgcgccatgagtcaaccgaacgtctggatcatcgaccaccgggattctttcacctggaatcttgcagaactcgtcagaaggacgggaatggccgttccgcgcgtggtttccaatgaatccccggaactggaacaggcggttcaggcgggggaaaagctcatcctgtctcccggtccgggaacggtggaggatgactgccaccgggccaccttccgccttctggagcgcctgccccgttttactccggtgctgggcgtatgcctggggcatcagattctgggcgtgcgcttcggagcccgtctggaacacctttcccggccccttcacggagcgcgggaattcatacgcagaacggaacagtgtcccatcctggagggattgccggaacaatttcccgccgcgctttaccattcctggcgtcttgcctccttcccctggccggcggagctgattgtcacggctagggattccggaaaaaacgtgcaggccatccgccacaggcatctccctctttacggcattcagttccatccggaatccatcctgacgccggacggagaagcgctgctccggaacttcctgtcccttccggcaggaagccgggaaaaacggcgcatccaatgattccaccccagcccccggcatcagggatgaacgggacaagactggaaggtgtctcactcccgtgcggttccggctcccatgcccggccgcttcagagataacgtttttcccctttatgaatgcacaggacgaactcaagaccagggacatggaaatcctgttccagcctttccactcacgcaagctcaacactcccacccgcatcgtcctccccgccatgacccggggattttctcccaacggggttcccacggaccaggtagccgcttattacaaaaggcgggccgggcatgaagtagggctcatcatcacggaaggcacgttcattgacgagcccagcgcctcaccttcctccaactatcccaatttcttcgggggagcctccctgcggggatggaaaaaggtgctggaagccgttcacgccacggattgcaaaatagccccgcaactctggcatgtaggcatggcccggcccttcaagggagaagacctgccccatccggagctgccgcccatcgggccttccggaattgacgtaaacacgctggaacagacggctgaaccgatgagcatctccaaaattgaggaggttatcaatgcttttgcgaaggcggccgcagacgccaaacggctgggttttgacggtgtggaactgcatggagcgcacggctacctgattgaccagtttttctggaaggagaccaacaggcgcacggacgaatacggaggcgacctgacaggccgaacccgttttgccagccgcatcatccatgccgtccgcaaggcggtgggcagccgattccccatcatcttccgcttctcccaatggaaaacgggccattatgacgccaagctggcgtatacccccgaggaactggaagcttttctggctccgctgacggatgcgggcgtggatatcttcgactgttccacgcgccgtttttgggaaccggaatttgaaggttcccgcctcaacctggccggctggaccaggaaacttaccggaaaacccacgatttccgtcggctctgtggggcttaagggagattttacgaatgcctttgacggagggccggaagcggaggccgccagtgtggaaccgctggtggaacggctgaaagcaggggaatttgacctgattgccgtaggccgcgccctgctggcggatgcggaatgggcggaaaaaatacgccatgcgcgggaaaaagaaatccacctgtttacgaaggaagacctgaaaacgctgaaataacggatcaggcctcttcccccatttccgcagtaatcatcattcccgcagaagagacctttttatttcttcctgacgcggacagtcaggtacaacagccgcaaaagaaccagggccggaatctgaagcgtcagcaaataccacggagcggaaccgaaatattccagaacagttccagccggggcataccgggtaaaaccgtaattcgtatccagccagatattcaccggaataataaaaaccaggtaggcgtcgcacaaacccagagcccgcatgtcgtcccacggccgcgcgcgccattgcaggacggcgggaaggtaaagggcggaaatcaataaaagcccgtgcccaacgaaaaaggcgaaaaaggcggcggagggaaaaccgtcatgaagcatgggtgtaatcagtccctggacgctcgccgtcagcacgccgaaatacgccacggcgcatgcccagggcgtgcggaaccacagggcgataaaacagaccagcgtcatcaaactgcaaaaatgcagcggaagcctgtcctgccagggttcccaatgttctctgacgatgcggccgaatgtttccatcagaaacgtcaacaggaaaacccctcccagaatctttcccacaagcaaacggctctccatccggagccgccggcatccccacaggagcccccctgcggccagggccacgatgcccagggcagcccagtgcggcaggctccaacggacaaacaggggcgtcatttctccggtcataaaaagatccatcaacgggagggaggaggttccgggcacgcatgaagtttggcgctgatggcctccaccttaagacgcagaacacatacggaacggaccatgccgggggtaaaatccgcatccctgcccgtctggtgcagcatgatgcggcgcagggcatgcgccttttcctcatccccccggagaaattcgacgacgccacgccccatgacgcagccgtaggcgtaactgtaccggcacggcatatccccctccagcaacacatgatccccatccatttcaaaagaaacctccggacggttttgcaggatatccagctttcttccttccctggcgcagtggaaaaacaggctcagggaaccatttttttcttcataaccgaagttgagaggaactacatacacctccctgccgtcccacagccccaggcggcataccttaaaccgggcgatcattcccagcaaatccccatgccgggttacttccctgtcttttcttctcataagccggcgtcctccatccgttcattcatccaaaaaatggcatgttcgtccggcagaaagccattccgcacggaagaacagggagaacccacctgaatgtgcagcattcgaaagcctctgcccctgaaaagaggcgccggcgtgccggaatcttccgaaacagcatggagcggaaccagacagggagggaatgtagaacggctactcatggcgacggaagatgaaacgcaacaaaaaatacagagaaaagacctccgggaaaagctttttgccctcttctctacgtatttccggaaccgggatgttcatcatgaaacgggaatatccgccacatccgcaaaaataccctccgccgcgcggcataaatccacaggattcaactcaatctggcaccccaggcgtccgccgctcaccaccatttccggcagggcctccgcgctggcatcaattacagcagggtatttccttttcatccccaaagccgtgcagccgccgcgcacataccccgtcacggcagtaatatccttcaccggaagcatggaaagagccttctctcccacggttcgggcagcctttttcaaggaaagctccgcgcctatggggatcacgaacacgtaatactgccgtggagcaccctccgttaccaacgtcttgtacatcttctcctccgccagattcagtgcttccgccgtatgccgcgcatccacaaactcgcggcattcataggaataatgcctgtacgggatatgcagcgcatccagcagacgcatggcatttgtctttgcctccttctttttggacataaacttgaaaaaggaatgtcccggtaacatagggaaaaagccttcctttgacaagcccgggagcccccaacggcctctatgaaaaagtggaatggaaaacggggctttctctgaaagaacggtaaggacggcaacgccgttcccccagtgccgcccgttcacggcggaaaatttcaaaaacggtggacagcgaaaaaggaaaaacgcctcatttccgcagaacccttgacttgacgctggcagaaaagataacatccggcatcatggaagattatcgtgtccggagaagctttggagaacatgtcctgcgcggctccgtcctgattgcagccctcttcatcatgtctctgggcatcgctctgtccgccaaggcagacctgggagtctcccccatctcctgcacgccctatgtgctcagcctggcattcccgctaaccatgggaaccgtcaccatcctcatgcatctgagttttgtggccgtgcaggcggccctgctgaaaagacagttccgtccggctcatctgctccagattcccattgtttttatcttcggcattctgacggatttttccatgtggctcatggcgcctctggaaccggacggatacctgtggtccgttattctctgcctgttcagctgcgtggtcatcgggttcggcgtctttcttcaggttaaggcggatgccgttcttctggccgcggaaggcatgagcctggccttcgtcaaactcttcaaatgggaattcggcgccgtaaaaaccggggtggactgcacgctcgtctgcatcggcctggcctgttccctcatcttcctgcccggattgacgggcatacgggaaggaaccgtggtggccgccgtcctggtgggaatgatcgtccgttttttcaacagacacgtcttctggccggacaggctcctggaacggctggcaaaccccggagcctcaggcgaacttctttcgctggcgcaaacagccgtttatgctccggacgcccctctggtcatttccattgaccgggaatacggttccggcggccatgccatcgggaaaatgctggcggaaaagctgggcatccgattttacgactcggaactggtgtacctcacggcctcccagagcggcctcactccggactacatccgcaagcacgaacaacagctttccagccgcttcctgcatgaactctacgcccagaactacgcctacacagcggaggaactgcctccggaagacgccgccttcctggcccagagcaaagttatccgggacattacggccggtcaggcgtgcgtcattgtgggccgctgcgccaacttcatcctaaaagggaggcccaacctgttcagtgttttccttcatgcggacaggaacacgcgcatgcagcgcgttattgaaaactacggggtaaaacctggcggcgcagcctgagccatggatatcatggacgcccgccgccgcacccactgcctgcactacaccgggcaggaactgggcaatgcacgcctctacaacttgtgcgtcaacacgtccgactatggcctggagcgcacggtggaactgattctggaagccatcaacaccagaaccgaacaatcttcctctgtagaaacggttcccgtccgctccgcatcttttcccgaaccggaggccggcagcattcccggagaaatatccctggcctgaccggggcaaatgtctcaaacaggcaatacttatgtaaaaactgcctgatcggtaaataagaaacccggcaggaaagcagatggctccttccctataaaagcagccccatctctccaaacttccccggcttttttccggctgcgcaattcaaagcaacaagatacggcctttctgagtccaaaaagcatgagactctggtcactccacccctcttacctggatgctgtcggcctggttgccctgtggagagaaggcctcctggcacgcaaagttttgcaggggcagacaaaaggctatatccatcatccccagctcttccgcttccgggagacgggaacccccattcatgtcctggatttctacctgaaaaccgtccatgacgaatccatccgcagaggctaccattttgatttaagcaaaatttctccctgtgaagtccggcccccttcccttctccttccggagaaacagctcgaatacgaattctttcatcttctggacaagctcaaggaaaggtccccgcggcaatattccctgttgcggcaaacggccgttatccttccccatccgctttttcaaataaaaccaggagatatttgctcctgggagaaaaagcctgttccgtcattaacatgacttcattcccttttccggaaactattgatctttttaatagtgacggcgatcaaaccacagacatacgccattcccatctcatcacccggcaattactgcagcgaacagaattactgtaaacctttccaaccttttgctttttcaggctcatacagtgaaaaaacatgtccggcaaaggaaaaggccttaaagcgttaaccgctttaaggcctttatttggtggagcatagcgggttcgaaccgctgacctcttcaatgccattgaagcgctctaccaactgagctaatacccctttgactttcgtcttggtgcgtcctgttgaggacgggggaaatctatcatttccaaagcgggcatgcaagctttttctacaaaaaaattgttccgggatgatttttccggaaaatactgaatctgggaaggggtgcaaatcccatgcagacgaaaacagggacagtctgaacaaatgtgtttgaataagactcattcctgttttaccattccataaatgatgaaacgccctctttttactcatcgcatgatattcgcctgcgctctggcaattttgtttctggccggttccgttcatgcccaggagacttctgctgcagaaaggccgccggcccagacggaggacagcggcatctccacaccccgcagagtcgccggactgggcgttctggcgttcctgatcggctggatgatttggagaagcagttccagccgccaaaaggacagaggccatgaacaggagaatccccggtaatgacgccgtttttgaaaggttgccctgcttcctggcgtagtcgttgcaggaaagtgtctccggccatgaacatgattctacccatcctgagctttctttgcggcgtcatgctgacggaagcggcttccggctcttccggggagggaaagccttctcccggcgtagtgcaggaattatggttcggcattccgggagcatccgtaaaggatttgacccacaggaagatttttgaaacggcggccccggatgtccgcacaatcagccatctggatgtggaaaaccagggggacaggtacggggcccgttacacagcccttctgaaagtcccggcaagcgggaagtaccgcctttacctgtcttccgatgattccgcagaattatggctgggcaaggatgctacccagaaggacatgacctgcatcgccaccgtcaaaggatattccgacatccataattggggcaatcagcccaaccaggcttccgaacctatccaactggaggcggaccggttttatttccttcaggtgattcacaaggaggatggaggcccggaccacatgtccgtagcctggtccggaccggacatcccctctcccgtcatcatccctgccacggcgctgttcataccgcccggtatcctgccggaagaaaaaaagcaatccccggccaaagcggactgaaaagccctttgattaccttccctccggcccttccctgctttcaggagatagtatctatttgccaatgagaaaatgaatatttttcatcaaactctatccatcaattatttccaatacgaaaaaaccggacctccccccctatgggagaagtccggtcttttctcgtcgtttatcatgtagttaattgaagcggcctgacacagaaaaatgccaaaacaccttctgaatccaaatctaacggattttagaatccgcagtcaagttcctaccttgaaaggaaaagatttgagaaaaatcccgatgttcttcgaggatattcatcttggatacaaaaaactctcagcttttcatgtgaaggataaaatttcaagagaatgaagaaggcatttttgttattcatatcttttttaaatccaagaatcatttattttcaataatctatctttcttgccgtccataaggaacggacattgccgttcagaaaaaatgcttctcccctcctgaaattttttatcattaatgaaactgcggattctaaaatccgtgttacgaggagaatacctgaatgagtgatttcgaataaaacgccacctgtcccaaagagccaagagataagcgttttcacgtgaaaagagccgcacgacaactccttttttcagaagaaagcaagtttgaaatcatttttcagtacgattaaaaaataagaaatgatgtagaatagtcctgccgcgagattctcaaaagattccatctgttgatattcagcaaattcattctataaaaaacatagaaaatcaataaaatattctgaaagaaaggggggatatattcagtatctcataaccctctgaccgtataaatgatgttgaatatacggaaaaaatacgggaacgcgggaaagtttcaacagacggaagaagcagcgcttttaatagacctgggttgctggacaaaagcagatgcgtttgccacctttccagatgttgccggggaaggtaaaaacaatcagacattaatgtctgcggcgccttgccagaaggcctcccagtcccaggaacgccagagaggatatcgccggttccggaatctggctgatggaaagggaaccgatgggtcatggaacagccgttgccggatgtgctgggcccagcctcccaaggtgagaccgttcaagtagagaactgacttttcatagttgatttccgttttgttgactaatgccgtgtctccaaggaatgcctccacataggtagagccgttttccgccaggaaattgacggtgagcatgccggaatagatgtcggaaacggagccgcttttcccggaaacattcatgttatttccattattggaaaaagcccaggtattggtggtggtagaaaaaccgaaggccgtcgtttgcgtgttgtatgctccaaagcccaaagagaacacggggccatttccaagctggaggccggacttcatttctgaggggatttttattcatcaagtgtagctaagaacgcctgccaacaaatcattttactggaaaagtacactttcatcccctgctccgctatccggcatgaatgactttcccgttattggaatagcaacggccgttccagttatacacctgttattatcattttattcacacctcttccctcttttttcagaacccgcattcttttttctcaggaaaaacatgaaacaggaaagactgcatggaaagggaagaaaacagagaacgctccttatgccatcgaaaaatccagaacgaaacatacgatttttcacaggcgttttttactttccataaatcatccccatgtcttttccacccccctgaaaacagcttcctaccattccccaggaacggaacgaggaaaacgtgacgacaattgtccttgttccaatgacgggcgggcggtagattttccgcgccatatgagcagagcatccagaacagaacgccttgattacctgaaagaccagttacgtaaaagggttgtcatcctggatggcgccatgggcaccaatatccaaaaattcaggctgggagaggaagattaccgcggagaacgttttgcggatgcggcacgctatcccaacgatttaaagaataataacgatcttctggttctgaccaggccggatattattctgaatattcaccgccgctttctggacacgggacggacggatattctggaaacctgcacattcggagccaccagcatcggccagcatgattatttctggcaccgtccggagaaaggcagccacaagaaccagcagtatttccaggaggtggtagactcccctgaactgaaagcccttgtccgggaattgaacctggcggctgccgcgctcgcccggcaggcatgcgacgaagcggaagctgcagacggcaagccccgcctggtggccgggtccatcggccccatgcccgtcacctgttccctgtcccccgatgtgaatgatcccggcttccgcgccgtgaatttccgccagctcaggcaggcgtaccgggatcaggcgctggccctgctggaggggggggtggacatgctgctggtggagacgattttcgacacgctgaacgccaaggctgccctgttcgccattgaagaaatttttgaggaacaaccggaaagctctgttccggtcatggtgtccgtcacgctgacggacaaagccggacgcacgctgtccggccagaccattgaagcattctggaactccatccgccacgtgcgccccttctccgtaggcattaattgcgccctggggccggacctgatgcgcccctttgcggaagaactgtccggactggcggattgccacatgtccatttatgcgaatgccgggcttcccaacccgctcagccctaccggctacgaccttctgccggcggatatggcccggttcatgaaggaatatgcggaccagggcctgctgaacatcgtgggcggctgctgtggaaccactccggagcacatcggcgccattgcagctgccgtggaaggaatgcctccgcgcgttccggctccccaaacgcccgcgcttcgcctgtccggatatgaagcgtataaccacacgcgggaaaaaaacaccctctttgtcggggaacgctgcaatgtggcgggctctcccaaattcgcccgcctgattcgtgaaggaaactacgaggaagcggtatccattgcccggcagcaggtggaaaatggcgcgctggtattggatttctgttttgacgacggcctgatcgacgggccgcaggccatggtccgcttcctgaaccttgtttccgcagagccggatatcgcccgcgttcctttcatggtggattcctccaaatgggaagtgctggaagcagggctccaatgcatgcagggcaagggaatcgtgaattccatttccctgaaggagggggaagaagaattcctgaaaaaagcggcgctgattaaaaagtacggcgcggcggtcgtggtcatggcgtttgacgaacagggacaggccgccaattacgaggaccgcgtccgcatctccagacgggcctatgacttgctggtaaaccgggtgcagtttcctccggaagacatcatttttgacccgaacgtcctgaccgtaggcaccggcattgcggaacacgccgattacgctcttgatttcttcaaggccgcaggctggatttcccggaacctgccgcatgcccacatttccggcggcatttccaatgtctcctttgccttccgcggaaacaacccggtgcgggaagccatgcattccgctttcctgtaccacgctacgcagcaggggctggacatgtgcatcgtgaatgccgggatgctggaggtgtacgacaatattcccaaggacaggttggagctgattgaagacgttctgctgaaccggaggacggacgccacggaacgcctgacggattacgcggaaaaactggctgcggaaaaaaccggagacggaaaggagaaaaaaaccgtactggcctggagggagcaggacgtcgccaaacgcctggaatattctcttatcaagggcattaccgaatttgttgacgcggatacggaggaggcttttcaggagctggggtccccgctgaacgtgattgaaggccctctgatggccggcatgaaggttgtggggcaactgttcggggacggcaaaatgttcctgccgcaggtggtgaaaagcgcccgtgtcatgaaacaggctgtagcatggttaacgccttatatagaagcggacagcaaaggagccgccaaagcggggaaagccgtaatcgccaccgtgaagggggacgtgcatgacatcggcaaaaatatcgtcggcgtggtgttgggctgcaacggttttgaaatgattgacctgggcgtcatggtccattgcgataccattctggaccgggcggaagcggaacaggcggacctggtgatgctttccgggctgatcaccccttccctggaggagatgtcccatgtagccgcggaaatggaacgccgggggatgaccattcccctgatggtggggggagctacgacatctgccctgcacacggccctgaaaatagccccccattaccaaggagccgtggtgcatacggaggatgcctcccaggtggtgcctgcagccgcctccctggtgggagaaaaaaaggattcctacattgccgccgtgaaggcccggcaggaggaattgcgcaacaatcatgaaaacaaaccagtccgagacctcctgcccctggagaaagccagggaattgcggtggaagggggcggaaggcggctatctcccccccgttcccgcccgtctgggcccggtttccatcggcagcctgcacagctccgtaagctgcggctgctgcagtgacgatccgcgttattacgtaactgttcaggagcttatcgagcgcatggactggacgccttttttccacgcctgggagctgcacggcacatgggaccgcgcccgccgggagttccgcaccaaggccccgtccaaggctgaggcggccgcggctctgtaccaggacgccctccgcctgctggaacaggccgtgaaggaaaaccgctaccaggcgcgcggcgtcataggcattttcccggccaattcaacagccagtcatgacgacatcaccgtctgggctgatgaatccagaaccattcccctggctacgctgctgacgcagcgccagcaactggacaaacaggggaaaccccggctggcgctggcggacttcatcgctcccgaaggcgtcagggattacgtgggggccatggcggtcagcatccacggctcccgccgctgggcaaaggaatgggaagccagaaacgactcctaccgcgccctgctggtcagctctctggcggaccgcctggtggaggctttcgctgccatcgcccatgacaagctgcgccttttgtggaatattccggaagggtccggcgtgcgtcccgcctgcgggtaccccagccagccggaccaccaggaaaaggaaaccgtcttcaccctgctccacgcccgggaggaagcgggcatgagcctgacggaaacatggatgatgcagcccgtttcttccgtctgcgccctcgtcttctcccatccggaaagcgcttatttctccgtgggcgccaccggggaagaccagcaggaggattacgcctccagaaagcgggcctcccggccctgacctcccctttccctttgatgcagcataccgaccagatacaggccctttcaggattcctgctggaatacgccaccaccctcatgggcgcgggggtgcacaccaaccgcgccgtgcgcaacatttcccgcattgccgccgcgtacggatacagcgcggacatgaccattttccagcgcaatatcaccatgagcctgatctgcaaggatgacgagacgctgcgccgcacctccgtccggaaactgaaacccctggcgttcaacctgaacctgatccagcagctcagtgaattgagctggctcccggtggacaacaacgtcagcattgcggaaatggaacaggcattccgctccatggtgcgcaccaaaagattttcccgctggacggacctgctcctggtcagcgtaggcaacgccgccttctgccgcctgtttaacggagacctgtgggccatgctgaccgtgttcgccgccaccatgctgggctttctggtcaagcagcagcttacccggttgaaatacaacccgctgggggtcatcatcctttccgccttcaccgcttccatggcggccgcgtgcgccgtccttttccagataggctccacaccgcagatcgccctggcaaccagcgttctgttcctggtgcccggcgtccagatgatcaactccatcatggacctgatgcacggccacatcctgatgggcatctcccgcggcgtccattccatcatgatgatcgtctgcatcgccatcggcctttccgcaaccatgctcatcgtcggggtaaacagcttatgaatccggatcttatttcctccatccttctggacgggctgatggccgccattgccgccacgggatttgccgtcatctccaatccgcccaggcgcgccattgccgtttccgccgttctggcggctgtcggccacgctttccgcttttacatgctgcactcctggaccattgacatttccagcgccaccttcattgccgccttcaccataggcatgctgggcgtcatgacggccaagctggtgaagtgcccggcggaaatattcgctttcccttccctgcttcccatgattcccggcgtatacgcctataagaccatcctggccctgatgcagttcatgcaggagaaccaggacgcggccgtcatgaaccggctgatcgtggacatctgcaaaaacggcatcaccgccttcttcatcatcttttccctggtcatcggcgtagccatacccatgctgatgttcaaacggttgagctatacacgcgtcatcaagccggggcattgaccttcaaacaagggagacagggcatttttctcttgccagactgcgccccgtgtggtttactacgccccgcaacggcagaaatgcctgagcagacagccccatagtgtaattggtaacacacctgattttggttcagtatttctaggttcgagtcctggtggggctgccaatccaaccctccttcaaggagggttttttgttgccttttttcaggattcatcctctcccggagcgcacttgaacgccatttcccatcatctgcgcaaaattcttgaaaatccaacagccgtactgccgcgcatgaagcatgcggaagtgaaggagaaggctggaaagagaggtactccatgaacggctcgcatacggcattccgggacggtaaaagctcttgcgttacagggatttttttgcataatcccccggcaggaatgacggaaaaacctatacaactggggcttgccgggctgggaacggtcggttccggcgtttatgaaacgctgtgccgcaatcacgcccttctggaagcccggagcaagattcctttcaggctcaagcgcatcgccgtgcgcaacctggaaaagcccagggaaaccgtcgttccccgggaacttctgacggacgattggcaggatttggtcaatgacccggaaatagacatcattattgagctgattggagggacgcgccaggcttacgacctggtgacgctggccctccgggccggcaagcccgtcgttacggggaacaaggctcttctggccgagtacggagcggagattttcaagctttccgcggaaatgggcacccccatttattttgaagcgtccgccggcggcggcatccccattatccagagcttgcagaattcactgatttgcaaccacatcaattccattgtgggcattattaacggaacgtccaactatattctttccgccatgggggaacacggggccaattacgcggacgccctggcccaggcccagaagctgggcttcgcggaagaagacccctccctggacgtcaatggctgggatgccgcccacaaggcgctcatcctggcgatgctggcctacgggacaaccatttccccggataaaatttacgtcagaggcattgagaacatcaccagccgggatttcgagtttgccaaaaaactgggctataccatcaagctccttgtcgtcatccggtaccatgaggggcaggaagacgccctggaactgcgcgtccagccctgttttgtccatgactggcacatcctggcttccgtgaacggcgtgttcaacgccatttccgtcaacggggatattgtgggggaaacgctgttttacggccgcggagcgggcaagaaccccacagcctccgccgtcatcagcgacgtcatcaccgccatgcgggaaagccgctatccggaataccatacgggcttcaatccctatgccaaggcctgcgggatcatgcacattaatgatacggtcactccgtattacgtccgcttccaggtggtggaccagccgggcgtcattgcggaaatagcccgcattctggccaccttcggcatcggcatttccgccacctcttccctccccagccatattgatgagggcggagccccctggaacgacctcgttttcatcctccactcctgcccgtggggccagcttcagaaggcgctggaggaaataacccgcatttcctgcgtggcggcggaaccccgcgtcctgcgcatagaacatcttcttcctcaatcctaacctacatatcatcctgttacatggctcttatcgttcaaaaattcgggggcagctccgtcggcaccattgaccgcatccgcaatgtagcgcgccgcatccatgaaaccgccagggaaggcaaccaggtggtcgccgtcgtttccgccatgagcggcgtgacggacaagctgatcggccttgctagggaattgtctgaaaccccttgcgaacgcgaacttgacgtgctgatggccaccggcgaacagcagtccatcgccctgctctgcatggctctgcatgaactgggggaaaaagccgtgtccttcacgggggcgcaggccgggatcaccaccttcggcagccacacgcgggggcgcatccacaacattgacccaacgctgatgaataagtacctgctggaaggcaacatcctgatctgcgccggcttccagggggttacggaagaaggaatggtccagacgctgggccgcggcggttccgatctctccgccatcgccatcgcggccgccctgaaagcggacgtgtgccagattttcacagatgtggacggcgtctatacctgtgacccccgcgtggtcaaggacgccaagaaaatacaaactctttcatatgacgaaatgctggaaatggcttccaacgggtccaaggtgatgcagtcgcgttccgtggaattcgccaaaaaattcggcgtcgtctttgaagttcgcaactctatgaacaacaaccccggtacaatcgtgcaagaagaaaccccctccatggaagccgtcgtcatccgcggcatttccattgaccgcaaccaggcccgcgttaccattaccggcattccggaccaaatcggctacacggcccagatactgggcgccctggcagaagcggaaatcaatctggatatgattctggccaatactgcccatgacggctatgtccgccagtcctttacgatgccctccaacgaactgggccgcgcccaggccgccctcaaaccggtcatggccgccctcggttccaccgtcaaggtggaaacggaagcgggactggccaagctttccctggtcggcatcggcatgcgttcccattccggcgtaggagccaccgctttcaaggccctggcggacgccaacatcaagatcggcatgatttccacctcggaaatcaagattgccgtgatggtggacgagtccgatattgaggaagcggcccgggtagtgcataaggcgttcaacctgggagcctgattttttcagtatttatcaactcttttttccgcgccggttcacgttcccgtgaaccggctttttcatgcggcaagaaaagcagcccttttccggaagaggaacgccatcccccgtttccttccaaattccgaatgaaggaagggccgtctctcttcgcatgctgtggcgagcggaacggccgtcatagaaacacaggggaatgacgccgccctttccctgctccggttttaccggcttgccgcccaggtttttcagcgttcacataaaatccatgcctcctggaacggaattctccgggggaaagggaagtccttacaggtacggagcaaaaaagcacaacaaacagaaggttcatctacagggaatccaccgtcctccgcaccacgcagaggctgccgcagtcaatccctgttattgcacccgtatcgtctgctcaatcagttcgttcaggcgcggcgcagtaatgccgccaaccatatccttcagcttcattccttccagatacagaaccgtcagaggaacggcttccaggccatatttgcgggctatgtccggataggcgtccgcatcaatcagcacggcaaacgccttgccgtcctgcgattcggcataagattttaccgcctggacgtaatccatggccggacggctccatgaagcgtaaaaaacaaggagtaccttgcggccggaaagttccgtaagctgccgcatgtcctctcccttgtaatccatccatacgggggcctttttcttgggttttgcgggcgggaggacttttttgggagggtcaaacgtcctttccagaggacgcggagcgggctttttttccgcataacgggcgcggcgttcactggaatcgtcgcacccggtcagaccggccgccagcaaaccgcagaccaatatgaacaagccctgtttcatccgcaggcaagtatgcccggagaaggcgaatttgcaagtctgaaacccatcccgcttttcgcgttgcccctcccccctctttctgttatggtgaaggttgcatgaatggcgtccctccactggaattcgcaggtgtttcccactgggcggccctggccgcactcctggcggcgggaacctgcatcctggagctggggcagtcctacaagaaaaccgtcagaaaccgcactaccttctggctgggggcggcctgcctattcagcctggttcccgacctggccgccatgctggccgatgaaccggaaaagaactggacatggatgctccccctgcatttctgctccgtcatgcaggtggtgtgcgccctgagcctgtggataccctcccggcggctgcgctccgtggcctattactgcgtgctgtgcgccaccctccaggggctggtgactccttccgtggcccatgatttcccctcatggacgtatgttgcctttttcctgtcccacggcgtgacagtcatcacggcgctctacctgcctctggcgctgaaatggaaaccggcgcgatgggacttcctgtgggcttttttgctggcgaacgcgtatctggccgctatccatcccgtcaacatgctcctgggaaccaattacgggtttaccgtggccacgcccgccggaggttccgtgctggactttctcgggccatggccctggtacctgctgtggatgcaggttcctgcgctggcgctgatgtacctgctcacgcttcccttccgccgttatcccaggggccgcacgggcagttccctgctccgccattgaaagggaatctttcttccccgccccgccgcttccgacggaatccccgcaaaacggcccgcccgtttccggaaaaaaagagccccggaaagttctttattgtataatcggcttgaggatgccgatgtaggtgtccgatgtccctgttccgcgataaatggaattaatcctgattttgatggtgtgcacaggctgcctgtaataaggaggcacgacgatctgcggagtccagtcatcccgcagcgtggcgtcaaaagtataagttccgttcagcgtcacctgaatgcctttggggcggctgaacatggagtaggcaatattcgggtgcctccgggcttccgaatccttttccgggtcggtcaccggggaaatgccggtctccagcatgattcccagcagccggccgggtttcctgagcttgatttccagggtttccccctggccgtccccggaaacgctttccgcccaatagccggaactttttttcaggttgtccggtgaacatggagccccgtaagggtccctgtccagggtggagctggccgttacatcgtactggtccgtcaaaacgcctttttctccgcggacggtaatccgcccatccttgtccagcacccaaccggggcccggagtaagcaccaaggagggagcgtaaggcctgccgtccgctcccagcagagaccaagtataaacgcctttgggcgtcgtcacaatggatttggcatccgcagagggatccagcttgacggactggttggtcatctccgagctgtacacattgaccaccgccctgggggtgccccccgtccaggtcattaccggagaggtaagcagcgtcaggcgcggttcccccatgtggaccttcggttccggcgtaatggcaacgtcctgcgtataaggaacggagaactggaaggcaagaacatggattcccgccttgttgggaacctgggccaccagccagtgagttatgccggcaatgggaaacatggagggagcgtccgcctgtagatgccgcccctccaccagggaaaaatcacatttcagatcatccacggatgtgacgacgtcctgcaccgctttcgtaaaagggaggctgcgtatgggttcctgcctggcggcattggcctgttcatcaggcggttcgtactggaacggcacgcctacggaaatggttttccccctgattcccctggggatatccagcgcgcaggtgtaaatcaggaaagcctggtgctgcttcagggaaacagtaacgtcaagcgcgttcagccggattccgtccgcctgcgtcaaatccatgggaacgggcaagccgggaaccggagcgatgctttgaaaggatatctcctgctggcgggggcggtccgctttttccgcggcggtctgttccttctgctggggttcggcggccatgcccggcacgcagcatgcaatgccggccagccagatcagggtagccaatctcatggccgttagattaacgcgctgcagcccgttcatcaagtccatttaggggaggggggaaaggcctcttccgtacccgctcttttccctgaacaaacaggggcggccctcctttgaaccagcgacgcccgcagcaggaaaatattcgttccaaactccggaattggtcgcttcatgcccttggaaacgggctccgggattccgcctggacgtctttccgcttctccggcagaaagatgacatatgacaggtaaaaacaaactgaggggcatcggagggctttttccgccacaaaccagcatcatttactcattagcaacaatcggcatccattgttgcgtatttgcagaaagactgtgttcttccgctttcccggcgccgttaatgtactcttattaccaggttttttcatgaaaagcccgtttccgggggagagccaaaacgcccagccgcccccccttcgccaaacaaaaaaagaagcatgcggaagacagaaaaaatcacgcaagacaggagaaatttttctagaaaacaggacaaacaacacaatatatagcgtatataaaaaaatactgtacaatatttccttttcatcaggattatttttcagtagataatgcacacgctacgcgccgccgccccacgacgaagcgcaagccttacgggattattcccaaacctttctacttcgcaatccaatgaccacagacaactcgcaaaccatactcaaactgcgcacaggccaggaaatcatcctcccccagaggaaagacctgctgggcggtttgaaattcaccagaagattttcacacaatgaagtccacccctatgatgaagtggactggacgcgccgcgacgtccgcattatggattggaaaaccggcaagaccatttacgagcgcctgggtctggaagctccggcccactgggatgacaacgccgtcaaaatcacggcggacaagtaccttttcggcagcgaacccggctccctggaatatgaagacagcttccgcaatatctacgaccgcatttccaatacctataccgtatggggatgggaggaaggctacttcgccacgctggaggacgcggaaattttcaatgaggaaatcaaggccatgctggtgcagcagatatgggcgcccaactcccccgtctggttcaacatcggccactgggagcagtggcgctggggacgcccggacctgagggaaaactatacaggccacggcaacaaggcctaccataccaaagggaccaagaacaatctgaaaaccttcatggtccagtctacgtatgaatacccccagtgttccgcctgcttcctgacggaagtgggagacagcatggaggatattctggaccacctgacgacggaaggccgtattttcgcgtccggttccggcgtgggcatcaacctgtccaccctccggtcctccaaggagcccatcagcggcaagggccggtcctccggccccatctccttcgaccgcggctgggaccgcatggccggcgccatcaaatccggaggcaagacgcgccgcgccgcacgcatggtcctgatgttcagcgaccatccggatattttcgaattcatcaatacgaagaaccgccaggaagacatcgccaaggttatcctgcgcgaacacaacgtgcacgtggagctcaagcagattgcggagaccaagctggttgccggcactccggcggaaaaggccgccgcccgcgtcattctttccctgcccctggccacccggaacagttttgacccgcacatggatgccctgctgtacggggaaacgctctcccaccagaacgcgaaccattccgtttccctgaagggggatttctggcaggcgctcgccaataacggcaatacctacacgcgctgggtcacgaatccggcccacatcgaacagacattccgcgcccaggaacttctggaagccatggcccagtccatctgggacaacggggaacccggcgtgcacaataacgacgtaatcaacctgtggaaccccgtcaagtccatcggcaccatcactacgtccaatccctgctcggaatacgtcttcctgaacaatacgagctgcaacctttcctccttcaacgcctaccgcttcctgatcaagggagaggacggcaagcccgtttttgatgcggacgccctgacccacgccgcccgcctggccatggtctgcgcggacctgaatgtggaacgcggcggcttcccgattgaagaaatcgcggagggcacctacaagtaccgcacgacaggcatcggcttcgccaacgtgggcggctctctgatggccctgggcgtgccttacgattccgacgaaggccgctggattgcctcccagctttgcagcgccctgacggcggcctgctggacggcctccgcggaaatgggcgcggaactgggctcctacgtggaataccccgccagcaagaaagacctgctcgccgtgctgcgcctgcacaacgcagcccagaaactggcaagcgccctgccctcccagaaggattccaagacgctggacgacctgattgagaacatcatcgccaatgccggagggatcctgccggaagcgcaggggctcaccgcctcctatgccctgcatgcctacctcaagagcttcaaggcccctaccatgatgaacagggagcgcatcgcccccgcggccaaactggcggaagccgcttccgacatgtgggcgaaggtgatcaaggccacagcgcaccgcaacgcgtttgtttccgtaatggcccccacgggcaccatttccgccccgcttggctgctatgatgaaggcaccacttccattgaaccggactacacgctggtgaaatggaagcagctggcgggcggaggctccctgaagatgttcaaccgcctggccctggaaggcctccgcgctctgggttacccggaagacttcgtcaatgaagccgctctggaagtggcgggtctggacggcctgatttccgcgttccaggggaatatggattccgtcgtgaaccagctcattgtggacccctgcaatgaccaggccggccccgtgcgccttgcttggcgccgcctgctctccggcacggaatcccgcagtgaaattcaggaaaaagtggcctatatcagcaacccggccaacatggccgtgctgacggcggacgaactagccgtagtgaacggggccgcccatattgaatccattccgtggctgaataagaaggatctgccggtctttgactgcgccgccaccaacggcaacggcatccgcgccatttcccccgccggccatgtgctgatgctgggcgccctccagcccttcatctccggcgcgtgctccaagacggtcaatatgcccgtctccgccggcgtgcaggatatttacgactccctcatcatgtcccacgaactgggcgtgaagtgcatcgccatcttccgcgccggctccaaggcgaatgccgtttacgtggtggataccccggaaacgcgcatgttcaaggccaaccacgtctgggaacagctggtgaatgccggctcagacgccattgacgaaatcatcgcggaggcatccaagccgcgccagcgcaagctgcccggccgccgcctgggccagaccgtcaaattctccgtgggaggccagctgacgggctacctgacggtaggcgtctatgcggacggcacctgcggggaagttttcggacgcctgggacaagtcggctccttcgcctccggcatgtttgaagcttactgcaagctcctctccaccgcccttcagttcggcgtgcctctcaaggaagtggttaagggattccgcaattactccttcgagccctccgggttctgccgcgtgggggatgatacggaggcggacacctgcacggaaatccgctcctgcgcttccgtggtggatttaattgccaagattctggcgtggcttttcccggaaagcaacggctaccgcctgcgggacgtgttctccatccccagcgtcagccttccgggccaggctccggatacgacggtaagcgtgctgcccccccgcatcatcaccgctccggcgcatcccgctactccggccctgccggaaattcccgccggaaaggttccggaaggaacgatgctcaacggcgcctccctctgcccgcagtgccactccctggcctatgtccaggacggcaaatgcaaatcctgccgctcctgcggatacaaggacggcggctgcggggaataaacggtaaccagatcattccagacccgctctttccgggcggaatccggctgctgccgggttccgcccggtgaatttacggaaaaggtattttttccgggagagacgattttccggtcttcccggcccccgtccagcatgaactttccggaaaaagcgaacggaaaccgccgcgcggggaaaaggaatgataggcgtttgccttgaaatccggcagcatttcattcatagtccgccgcatacgcctgaagccgcacctttattttccatgaaaccctactataccctggctgaccttctggatgaaggacatccgtttgacgccggggaatccgttcccgccaagctggccgtgatcgggtttcccattgcccattccaaatctcccgccatgcagcaggccgcgctggacgcggcgggcattcgcgcccgttatatccgtatacaggcttctccggaagaattcggggaggtggtgcggctcctcagggaaaggggattcacgggggccaacgtgacggtgccccacaagcaggctgcctgttccctgtgcaacgacacggacgctctttcccgcgtcaccggttccgtcaatacgctcgtctttcaaaaggacggttccgtctccggcttcaacacggacggcccgggtttcgcccgcgccatccgggaagaattttccgtggatttgcgcgatttgaaagtggcccttctgggttcctgcggcggagccgggctagccttggcctacacctgcgccatgcagcgctgtgaacggctgacgctggccggaagatcggaagaaaagcttcaggagcttaaaaacaggctgagttcctttttcattgacgaacacaggctggaaggagcctccgaccgcctggcggcccaccagaacaatactccccgtttcaatgccgccgtggaggatgcggacctgattgtcaacgccacctccctcggcctgaaacctacggacccttcccccgtgcctccctcactgctttccgcccaccatctggtttacgatttacagacgcatgacgatgccttccagatggaagcccgctttcagggcgccagagtttccaacggcctttccatgctggttcaccagggggccctctcctttgaacgctggttcggcgtcaaaccggatatttccgccatgcgccgggctcttgaacaaaaacatgactgacgccccccctcattttaacgtccatgctttccggaacgcgctggtagaatggttcaggcgcgaagggaaagactacccgtggaggcggacaacggatccgtggcacatcctggtttccgagctgatgttgcagcagacaaccattcccaccgttctgggaagatatgacaggtggatgcgccagttccccaccccgggccatctggccgccgtggacgagcagacggccctgcgctcctgggaaggactgggctattaccgccgcgtgcgctccctccaggccatcgccagggaaatcgtcaacaagttcggaggacggttcccggacaacgcggaagggttgaaacgcctgccgggcatcggcccctacacgtcgggagcgctcctctccttcgccttcaacaaggcggctcccattgtagacgccaatgtcgcgcgcgtcctggcccgcattgacaattattccgttcccgtggattccacggaaggccaaaaatacctgtggagccgcgcggaaagcctggtggacccggaacatgcccgtgaattcaattcagccatcatggaactggggcaaacctgctgcagcatcagttctccggactgcctgctgtgccccgtgcgccccttctgctccgcggaacggccggaaacgcttcccgtcaaaaatcccaagccgcaagtcacccgggtggagcaccacgacattctttacatccgcggcaaatccgtcctgctggccaaatgcccggaaggcaagcgtcatgccggcatgtaccgcttcccccagagggaggacgaccacaccctttccctgccccatgtcctgaaacagacctacagcattacccgctacagggtgacccgctacatccaccatgtgacggatacgcctctcctcagggaaggagaggaattcgtgccgctggacaaaatccacgggctgcccatggcatctccggaccgcaaggcgctgaactcccccgccctgggcaaactgctgaaccatatcagatgaatgacagattaacgccggaacttgtcctctccgcctattgccaggggtgttttcccatggcggacccggaaacgggagaaatctccttttacgaaccggacccgcgcgccctgattccgctggacgaccgcttccacatccctcacggcctcaaacgggctttgaataaaaaaccttttgaactccggatggataccgcttttccggaggtggtgcatgcctgcgcccggacggagcagccggaagaacaatggatagacgggcagattgaagaagcatacggcaagcttcacgagatgggcttcgcccacagtgtggaatgctgggacgaggaagggctgcagggaggcctgtacggagtagccttggggaaggcttttttcggggaaagcatgttccaccgaaaaacggacgccagcaagattgccctggtggccctggtgcaatacctgcgggcgcatcggttccttttcctggatacccagtggactacgccgcatctgctgaaattcggaacctatgaagtgccggccagggaataccggaagcttctgaagagggcgctggaggaacaataaactatattttactgtccggtataaacagtcatgagattgattcccaattgtggaatatccagtagcgcatcggattgcaagaactgttggtaatttttcttcagcctttaccatcaatacttgaaccatcaagccgaaccctatgctcgaatatccagaaagcatggttccggcataaaaaacgccggaattgaaattggcggtctccgggaaaggcgagaactgtgaaggtatgtccacccgcgcgcatggaacaatcggcccgcaggttcaagccatatccgccaaggctattcccatccgctaaaaagcccgtggttccgaagaaccacgggctgtctattaacccttaacaaaaaggtttattcctgttccagagccgcctgggccgcagccagacgggcggtcgggacgcggtagggagagcagctcacgtaagtcaggcccagcgtgttgcagaacttgacggaagcggggtcgccgccgtgttcgccgcagatgcccagcttgatgtccgggcgggtggagcggccgagttccacggcaatcttcatcagcttgccgacgccgttctggtcaatggaagcgaagacgttcttcttgatgatttccagttcctgatactgcggcaggaaggaaccggagtcgtcgcggctcatgcccaggcccgtctgggtcaggtcattggtgccgaaggagaagaactgggcggtttccgcgatttcgtcagccgtgacggcagcgcgcgggatttcaatcatggtgccgacgaggtagtccactttggcgcctttttcctcaaatacctgctgggccaccttgtcaatgatggctttctggatgtccagttccttcttgaaggccaccagaggaaccatgatttcaggcaccacggcaaatccttcttcttgggagacttccacagcggcttcaaagatggcgcgggcctgcatttccgtgatttccggataggcgatgccgaggcggcagccgcggtggccgagcatcgggttgaactcatggagttcggacacgcggcgcatgatgacttccacaggcatgccgattttctgggccaggtcaagctgctgttccttcgtctggggaaggaattcgtgcaggggcgggtccagaaggcggatggtgcccggcagccccttgagcgccttgaagatgcccttgaagtcccccttctggtagggaaggagcttggaaacggcggctacgcggtcgctcttcttggtggagaggatcatttcacggacgaagtcgatccggtccccttcaaagaacatgtgttccgtgcggcagaggccgatgccggtggcgccgaaggcgatggcggtttccgtctgcttgggagagtccgcattggtgcgcactttcattttggtgcagtcgtcgcaccactgcatgagcttggcgaagttctggtaggtgcggctgtcttccggcttcatggtcttggaaatcaggacctggatgatttcagagggggaagtttccaccttgccggcgtataccaggccgctcgttccgtcaatggagaggtagtcaccttcgctgatggttacgtcgccaacgaaaacggtgcggttgttgtaatccacaatgatttcatccgcgccgcaaacgcagactttgcccatctgacgggcaacgagggcggcatgggaggaaacgccgccgcgggcggtcaggatgccttcagcggcaatcatgccgcgcaggtcttccggagaggtttccagacggaccagcagaaccttttcacctctgtccgcggcttccacacagcgttccgcgttcaggtagatgcgtccggtggcggcgccgggcccggcgggaagaccgcgggtcagaaccttggcactcttgatggcttcacggtcaaagatgggggtcagcagctggtccacctggtccgcaggaatgcggcgcacggcggttttccagtcaatcaggccctgttccaccatttcacaggcaatgcggaaagcggccacgccggtgcgctttccgttgcgggtctggagcatgtagacggtgcggtcctggatggtgaattcaaagtcctgcatgtcatggaagtggttttccagcacttcgcgaatgcgcaccagttcattgaaggcggcgggcatcacttcatgaagggcagcaacgggggcgggcgtacgcacgccggccacgacgtcttcaccctgggcgttcatcaggaattcgccatagaattcgttttcgccggaggcggggttgcgggtgaacgccacgccggaaccggattcctcacccgtgttgccgaagaccatggcctgcacgttgacggcggtgccccattcggacggaatgccgtatttctggcggtacacgatggcgcggtcattgttccaggaaccaaacacggcgccaatggctccctgaagctgttcccaggggcattccgggaattcatggccggtgcgttccagcaccagggccttgaagcgggagacaagttccttcaggtcatcggcggagagcttggtgtcttccacgtcctcgctgccgaagcgttctttcttgatggcggcgatggcggtttcaaagggttcgtggtcttcatccggggttttctgcacacccagcaccacgtcgccgtacatctgcacgaagcggcggtagcagtcccaggcgaagcgggggttgttcgtagccttcaccatggcttccacggatttttcattcaggccgaggttcaaaatcgtgtccatcatgccgggcatggattcacgggcgccggaacgcacggccaccagcaggggcatagcttccgtatcgccgaacttgcgtcccaggatctgttccattttggcaatgccttccttgacctgcgcgtcaagctgggcgggataagtgcagccgtgatcgtagtagtaagtgcaaacttccgtcgtgatggtgaatccgggagggacaggaaggccgatgcgggccatttccgcaaggttggcgcccttgccgcccaaaagatttttcatgctgccattgccgtcggcggaccctccgccgaaagaatagacgaatttgtcagtagatgcgctgcacgcgcaggaattggtggacatatcgattattgtagtcgaattaatgattctgcccaaacatcgaccaaaggagccaacaaaagacccaatagcgagttagggtcgaataaggatgccttcggctccttgctttgtcaatccgaaattgtacggaaaacaaaaatatttttcagagtttttggggaaaagaatgcatgccaaaaccctgcttttccagcctgtcccgtccggagccgctcttcctccgggcaacgccgcttcctgttttccggcggctccggaattacctgggaagaaaagcgcagcgagtttcttttcatggctgcccggaaaagaaaaacggacgcttatcaaccggataagcgtccgccggaaataatatgccctgttttttatgccttgcagaaggtgtcttcatccgcacagtcagcctgaacccacttgacggaggaatcaccggaagctatatgcacaaggcaatggtacacggcttcctggtccgcatccagccgggcagccatctgggcggcggtttccggggcggttcccagagccccccttaccctgcccagcagggccaggaaggaacccgccgcttttttgccggcttccacgccgggctggtggtaggcgttgatgttaaccagggaagcatagaaggaaacagcgcgctcaaacagggcaatcagcatgccgagcgttttggcgttcacctccggaatggaaatggtgatggaggaacggccggattccgccagcgcctggcgggtgccgcgcaggaagccctggaggaagtctccgcaggtggcgcccgcctccacttccaccgcatccgcggaacattcgcgcacttcaatgaaggtagcgaagaagttgttcacgccgtcacggagctgctgcacataggcatgctggtccgtggagcccttgttgccgtacacggaaatgccctggcagacttcgttgccctccagatccagccgtttgccgagggattccataatgagctgctggaggtatttggaaaagagcaccagggcatccttgtagggaagaaccaccatgtccttttcccccttgccgccggtagccttgtaccaggccagcgccagcttcatggaggcgttgcatttcacgcagtcccggcgcgtcttttcgtccatcaggcgcgcgccttccagcagttcatccacgttcacgccctgaagcacggcgggaaccagccctaccacggacatgacggaggtgcggccgcccacccagtcttccatcgggaagcgcttgagccagccttccgcctcagccgttttgtccagccgggagcctactcccgtgacggcaaccgcctggggagcgaattccagcccgttcttcctgaagaaatcctgggccaccagcatgccgttgcgggtttccggcgtgccgccggatttggaaataacgacgacaagcgtttcttccagagggagggattccagcacccggtacatgccgtccgggtccgtgttgtccagaaagaacatgtccagccccgccgcaggaatggcgtccgccaccagctccggaccaagagcggaaccgccgatgccaatgacgagggccgcggaatattgttccgcgcggggaggcgttattttgccgtccagaacgtcccgtccgaaggctttgacgtccgccaggggtccatcaatggcagccttcaattccggcgtgggagccagggaggaattgcgcagccagtagtgccccaccatgcgtttttcatcaggattagcaatggcgccggattccagcgccttcatgtcggcaaacgccttgtctatccgcccctgcatggaagacaggaacgcatcgtccagcggaagtttggaaaaatcaagggagatgcccagttctgggtagcgaacgagttgttgtgcgtataagctcatgatggtcatggattggaaaaagaattaccggagttttttcaggacgcttttagcctgcacgtctccctgatccgccgctttctggaaccattcccgggctttggccatgtccttgggcaggccgaaaccggtctgatacatcacgcccaggttatattgttccgaggcatagccttccacagccgcccggcgacgcgtgcgggcctgctccctggcttccgcagcggttagtcccagaacccgcgccgcatccggccacgcagctccgaatctggaggcggaaggggcatagccggcggctccggccttgcggtgcatttcctccgcttttttcttatccctcttcacgccgtatttgccctggtcatacaggaacgccatgccccagtagccacgggggcagcccagttccgccgcctgctggaaacattcaaaggcatctttatactttttggaacccatggcgagcacagcgtcggaaatgtggagttccgcctccttcaaaccgggaaattccgggatggccgcccattcccttttcagttcctccctgtcccttttggacttgggaggcatgccggagggaccggaaaaacggaaaagggggaagtagccctccatggctcccatgttgcccaggccggacatgaggaaaacgccgggagataccttccacatgtgcatgtactggatgcggccttcctgaagagattccctggccacccattccggcatgttcaccggttccccgaactgttccgtcaggcccaccagaagggccttataggcggatttcagtttggtttcatattcggaaccgcggtgcttgctccgggaatagaagacaacggccctcaagccgccggaggggtcatagtcaaagttcagggcaaaggtctgaccgcctatggcctgcctggttttaaacacgccgttgagtccggtgcgtgcgaggagggcatccgtgggcggaccttcaagctgcttgctccgcctcagggttttcagcacctggtccttgtccattcccacctccagcccctcatagagagcggcaagaagaggggcacacgtgagagcgaagagtccagcaacataggctagttttttcatagaaaaaagtaattgggcggctttctatcaaagcggaagcattttcaaaaggacaaaatgcgtcagccacagagagggaaattttttcataaaatattcattttcaatctatccacaatcttttcaaataatcctccccggagaaatccggaggcatggggtcacgggtcaggcggaaaccgggaacggcacgggccaccatcctgcggaattcctcgtggctgagcttgcggcagttgctggtgcacagcatccagccgcccggttccaggcattcgcgcgccagggccaccagctccccgtagtgggattccacccggaacacctttccgcggtcatcccgggaaaacgtgggagggtccagaataatgccgtgaaaggttcgcccctgcctggagaaccgttccagccagcggcgcgcgtcccccttgcaaaagtactggccggaggggtcaatgccattcagaacaaaattttccctggcccagtccaggcacggctgcgccagatccagcgtggttgtctgcgctccccccagggcggcgtaaacggaaaaggcccccgtataggcaaaggtattcagcaccctcatgcccggagcgcttttttccctcacccggcggcggtggtcgcgctggtccagaaaaattccctgggaataaccggcggacatgtctattttgaaacgcactccctgctccaaggccgtaaattgcaggggaaggagcggcccggcgatctggacgggcgcttctttctggttttgttccagttttttgtggaatacgggcaggcccgtatcccggagttcgctttccaggtccgcagtaatggaacatccgcgcgtggagacgagaatacgatccgccatctgatccacaaagacaccgggaattccatcccccgccccgtccatgacccggaacatatccgtatccggcggaatcaattccctgttgcgttccacgcaataatgataatttctctccacggcggagcaaagagtaacggatgaagaacgttcccgcaatgtcaaagaagcaggagcctcatttccttcggagcaagagttccgccaggaaaaacggtcatctggacggccctccttcatcaacagagacattaaaaaaatcgcctgcaaggctggaccttgcaggcaaaaacgcctttaactgctggcaggacaaggttttcaggctttccggcggcggcgaaccatcagggccgccagccccagcagactcagggatgccgtagccggttccggaacctgcaagccaaaagcgttgagaatgtctgtatccgcggcttcggtattaaacgtcgccagcttaatgtcagtgaatgtctccttcgccgcgttcgtccagatactggattgatcccatttcagagagcttgtaccggaggtgaaattaaaagaaactgttctcaaggtttgagttccgctgtacagggtagctaaggcagagcttccatcctggcttttccgcataatcagcgtgagaagaagactgcctctttcagttgtcgccgtcatatcaaaactctgacctgcataggagaataaacaggtatacccgccgtctgcggaggaggaagtcagctgtagtgcattaccagacgcccccccgttggtacgtgaggtcgagaaaatattttggggagaggaagtatttcttgtttccgtaagctgaaaagaaatggcgaaattgtccaaggacgttcctgttgttccttcactccacgtcaatgacgaattgccagaggaaagaacaccgttctgaggtttagtaaggctcagaagcgtaacaagatcaggactttctgcgttgacccacccgggcagcaaaaccgccgtcataatagacgatacaaataatttcttcatcacggacagcttatagccggattgactatccgctgtcaactttttctaaaagaatttatgcagataatagggagggaaagcctgataaaaaatacagaagaacaaaaaatgtccgcaagcatcttgctccgcaactcattcatgaattcaagaaatgtttgtgatttcattgagaagaaaggaattttatgttgtttgaaagttattgacacttaacaacttaattatctcattattgtttctgaatttttacagcagtgctgaactgcttcagcggatagtcaatccgcccgcaaaaaagaggccggatttttcatccggcctctcgcaacaggtatttacctgataaacaggaaattccgtttagtcagcgtactgttcgttaagagcttccattatttccctggaagcttccggaatgttggtgcccgggccgaagatggccacagctccgtgttccttcaggaagtcatagtcctgggcgggaataacaccgccgcagaagaccaggatatccggacggccctgcctggcaagttcttccaccagggcgggaagcagcaccttgtggcccgcggccagagagctcatgccgatcatgtgcacgtcgttttcaattgccattttggcagtttcttccggcgtctggaagagcgggcccacgtccacgtcaaaaccgaggtcggcataggcggaggagaccaccttggcgccgcggtcatggccgtcctggcccattttggcgacgaggatgcggggacgacgccccgtgcgttcggcgaagtcatccgtcatcttgcggacttcctccaccagcggatcttgaccataggattgagcgtacacgccggtaatgagtttgattggtgctttatgacgcccgaagtgtttttccagggcggaggagatttcacccagggaggcgcgggccttggccgccttgatggcaaggtcaaggagattgccttcccccgtgcgggcgcattcggacagggcttccagcgcggcttcgcacgcggcggagtcccgttccgcgcgcagtttctgcaggcgggcgatctgggcttcccggacggtggtgttgtccacttccagaatatcgatctgggcttcctgttccaggcggtatttgttaacgccgatgatgggttcctttccggagtcaatggcggcctggcggcgcgctgcggcttcttcaatgcgcatcttgggcagcccggtttcaatggccttggccatgcctccgagtttttccacttcctgaaggtgggcccagcccttgcggatgagctcattggtcaggtattccacatagtaggagccgccccacgggtcgattaccttgcagatggtggtttcatcctgaagatgaagctgggtgttgcgggcgatgcgggcggaaaagtccgtcggcagggcaatcgcttcgtccagggagttcgtgtgcagggactgcgtatggccgcaggcggcggccagggcctcaatacaggtgcgggtgacgttgttgaacgggtcctgttccgtgagggaccagccggaagtctgggagtgcgtgcgcaaggccagtgacttcgggttcttggggttgaactgcttgatgagtttggcccacagcacgcgggcggcgcgcattttggccacttccatgaagtaattcttgccctgggcccagaagaaggaaagacgcggcgcgaaggcgtcaatgtcaatacccgccttgatcccggtgcggacatattccaggccgtccgcaagggtgtaggccatttccaggtccgccgtagcgccggcttcctgcatgtggtagccggagatggaaatggagttgaacttgggcatgaacttggaggtgaactcaaagatgtccgcaataatcctcatggagggatcaggcgggtaaatgtaggtgttgcgcaccatgtattccttgagaatgtcattctggatcgtgccggagagctggtccagcgtgcagccctgttcctgagcggcgacgatgtagaaggccagcacaggcagcacggcgccgttcatggtcatggagacggacattttgtccaggggaatgcccttgaagaggatttccatgtccaggatggagtccacggccacgccggccttgcccacgtcacccaccacgcgggggtggtcggagtcatagccgcggtgcgtcgccaggtcaaaggcaatggaaaggcccttctggcccgccgccaggttgcggcggtagaaggcattggattcctcagccgtggagaagccggcgtactggcgtaccgtccaggggcgcgccacatacatggtggcatacggtccgcggaggttgggagccacaccggctgtaaagtccaggtgcaggcagtcgtcgtacacgctttccgagtaggtgggcggcacgggaatttgttcattggtcatccaggtttccgtttcggaagccggggacggggcaccagccttgatttcaggataggaggcggatgcaaaatcaggaatattgctcattgggtggaataggttggtggttgttagaggccaattttgttttgaatagcttcaacggtgttgtagcagttggccttgacgtggatgaagatgtccacgccggcttccttgaatgcttccacatagtcggccggataaccggcaagggccaccatcatgtccggtctggtctccctgagcgccttgcagaaggcggggacgatttccggataagtgtcatccgtggagcagatgacgcatacggcgcagccgctttccgcagccgccctggccgcgtcttccggagtttggaagccggacggataaaccacatccagaccgccggcgcgcaggaagtcgcgggagaagtccgcgcgggccttgtgctggcgaagcggccccatgttggcgaagaagaccatcggccgggaacccttttcctccacccaggcgtcagccttggcgagcagggattcaaaacgttccgccaggcggcgcttcggcagggcttccatttccagaggttcgccgcacttacagtcaaccccggccaccagggccttgttgatgagacaggtggaaaagccttctccggcggccttgcaggcggagtccacgctcatttccacttccgggagctggatatccgcattcttgcagcagccgtgccccttgtgggcggagcagcaggagccttccggcgcctccagcttcttctctgccaggttgacatactggttgacgcccacgatggactgccggcgctggtccgccagttcgtaacgtttggcggcggtggcgttcaccttcttctggatgctgccggctttgagagccttgacgatgccgccttccttttcgatgccctggaagaattcccatatcttccgggaggcttcatccgtcaggttttccaggtaccaggaaccgccggcggggtcaacgaccttgtccagattgcattcgcccagcagaatcagcgggcagttgcgggcaatgcggcgggagaattcgtccggcatgcgcacggcagcgtcaaagggcagaacgtcaatactgtccacgccgcccatgatggcggagaatgcctgggcggagccgcgcagcaggttgacccagggatccaccttggagagggtccagaaggaggtgcgggcatggagcttgattttggcagcttcctcgcttcctccgcattctttgacgatgatggcccagagttcgcgcaaggcgcggattttggcgatttccaggaacaggttggcgccgatggagaccgtaaagcgcatgtgcgccgcagtttcatccacggagaggccacgttcctccatggcgcgcagataggccacggcagtggacagcatggcgcccacttcttcaaaagcggaagcgccggaatccgcgtaaggcagcccgctgacgccgatggtctggaagccgggagcgttggcgacggcccatttggtcattacggccatctggtcatagtaggcgcagatgccttttcccccgcaaagggaacccttcatcacagctttccccaccgggtcatatagaacgccgcccctgagatccgccgtcttgacgccggcggccttgcaggtgttcaggaacatggagagggttcccaggccgcaggaaccgggagtgacatatacgggaagcccgtccagccggacgcccttgagagccgtatcccagtcagcctgcttgcgcagtttcaggccgcatttgcagttgagctggatgtttacggcggtcaggccgcgttccaggtcatgcagaagcttggcgttgaaatcctcaggagaggaagcgggaatgctctgggcgatttcgcagggcttttccatatagcccaaggcgcgcgttccgcggcggtacggaaattgcccggcaggcattaccggggaatgttcatcccatttgttatagatgggatgcagggtaattccctccacaagcttggtaaaaagcttcttgtcaaaatcagcccctttcagggcagcgactgctgcctcgcgccattcggcgtatgtggctggtgcgaattctccgaaatcaatttccggagccgttgttttatttccctgttgcatggcgaagtcaatgggtaaggcctaatatgttggtttttaactatgcgcaaaccaggccaagtttaaagcgcaacattattttaggaaatcaaagtgtaaagtccagcgagaaaaatcctcccgtccgcctgcaaatgcgaatttgcttcatcacgcgaggcaaacttgcaaaaacgatgtccatggcgtaaatacgggaataagcatgcccccttccactaccgtcaaactccctccccagctggtcaggcagctccgaactttccggcgccgcctcagaacggtgaagatgctggaagccgtatgccttgcaggcattgccgtcattctttcctacgcgctcctgtacctttccgacagattgtgggagacgcctcccgccgtcggctggctcctgtttttcatcgccgtgtccggcctggcggtgtttattccctggtggagtttccggtgggtgtggcagaggcgcacggaagcccagctggcgcggctgatttcccggacggacgcggccctgggggatcgtcttctgggcgtcatcgaactggattcagaaaagcacggccgccaatacggttccgaaaagctgaaagaggcggccatggagcaggtggcccgcgaagtgtccgcccgggatctgacagtgaacatcccccggcccagccacaggaagctgttcgtcctgctggcggttctcgccgcatgcacggcggccgtatgtgcggtaagcccggaagcggcagggaatgccctgaaacgctgggtccgcccgttcaatcctccggaacgctatacattcacccagctggcccccaccccggattccctggtcattcccatgggagagagctgcctgtatgaaatccggctggcggagggaaccaaaacccgcccgcagacggcagagtattttttccgcaacagggtgagccagcaagcgcctcttgcggacggcgcatacaagatccacatcccccccatgcaacaggcggacagcctggagttctttgcaggggatgccgtgcgacggctgaacatcatcccgaaggggcgcccttccctgctgggagccgaagccggcgtagcctatcctgcctatatggcgcgcgccaacggcagggaagccatgagagcaggagttatttccgccccggaaggctctacgctgacgttgaaggtgtccgcctcccagcatctgcagtctgcggaggacgcgcagggccatccgctccgggtggaaggaagcaacgtcatcattccgaacatccttttggaaaaagagcccagggaaatagagcttgactggatggacagcgacgggctggctgcttcccggcccgtgaagatacaactggaacccattgaagacaaacagccttccatttacctgagaggcggcgaaaacgaccgctacgtactggaggataccagcattgagctggaggtagaagcggcggacgatttcggcctccgggaaatgggggtggaatggcagggtgaaaaatccttttacgacggcaatgaggatgaaaacggagcctcagctccaaaaccggccggtgcggacaaaccggcgcccggcctccgcggggagaaagtgctggcggacggacagcccacgcagaccgggctgaaaggaacattcctgttccaggccagggcgctgaagctatctccccagcgcgtcgtcatccgcgggtttacgcaggattacaaaccgggaggcaaacgcgtttattcggaacccatgattattttcgtcctttccaagtccgagcacgcccagatgattcgcaatgaactggaacgcatcaccagcgatctggaaggcatgatccgccgcatggacgccatggcggacgaagcaaaacggctgaaaggaatggaaaacggcaaattgaaagatgcggagtcccaggaacgcctgcacgccctggccgatgaagagcaggccaacaggcgcgagttgggagacttgctcaaccgctcggaaagcctgtttaaggaagcctcccgcaattcccagatagacccggccggcatgaaggaattcatgaaaggaatttccatgctcaaacccattcccgacgggtccatgaagatggcccagaagctcttccgggattccgcctccgagagccgctccgagcaggaaagcaggaaggacctggacgacggggagaattcccattccgaagccacacaggcgctgaaagacaccatgaaccagctctccaagtccgcgcaggacatggaggccagcacattcgtggcacggctcagacaggccgcatccaaggaggattccatcgcccatgcgctggccggtcagatcaacaccattgcgggcatgaccatggaggagcttgacccttccaccaggcgtgaaatggaaaccatcgccacccttcaaaatgcctccacgcaggacataggctggattctggaagacctcagctattacaagtcacgcaccggggagcgcatttacagcgacctgtacaaccagatgaacgctttctccctccgggagaagctggacctggtgcacggcaatatcctgaacgcaatcacagcccgctccattgacgagtcccgcctgtatgcctccactctgcgccattgggccaaattgatagacgactataagaagagccgccgcggcggcgggggaggaggaggcggcgggggaggcagccagtcctccatttccgacgccgagtttgaattcatgctgaaactcatccgcatgatccaacaggaacaggatatccgcatgcgcacccgcgccgccgaacaggaacaccgaaaaaaacttcccccccctgccccatgaataccgccaattttccagccatgattctggcgctttccctgccctgcgccgccgctccggctcccgctccggaatattccgccaagcacagggaaacggcatccaaactggcagtacaacaggacgagctccaggcggacacttccgaccttatcctgggagaaaccaatgaggaggtagtggacctgctgaaaaaatgccgccatgccatgaatgacgccgtggacctgctggaagtttacaataccggaggccagacgctggccgcgcagtcggatgtgattgaattgatttaccaggcagccaaggccaagatgaccggggccgacggccggcccaagccgggaggaagagctcttatggacatgctgcgccagctgctcggcatggatagcgactcccagtccgcggaacagcaggaagggaatgggaaagggcaggaaggttcccagagaggcagcggcaacaatcccggacgcggagcgaatggaaaatccaatatggcctcctcccaggataaaggcgtttccaatccggacacggctgcggaaacgcgttccgttcccaaatccaccggcatgtccgcagacgacatgccttccgaattccgcaaggcgctggacgcctacaacaagactttgcagaagtgagacgcatctctccggacagccttttcacgcatgaacagcaacttcccgtttccatgaaaaatccccgcctcctgcttaccgctttcttgacctgctgcatgacggccgcaccgcaaaacgcagcggcccaatcccccatgagaacgtcttcttccgtgccgccccaggtggaactgatgtatgtgaaggggctacgctatcttcagaatgcccagaaaacggatggaacctatgatggaacttacgggagggagcctggcatcatcggtttttgccttatgtccgtgctggctcacggagacgatccgaacgcggggccgtacgccaccatggtgcgccgctgcgtagattacatcctgtccaggcagaacaaggtatccggctacattggggattccatgtacaaccacggcttcgccactctcgccctggcggaagcctacggcatggtgcgggacgatcgcataggccccgctctccgcaaggccgtggccctgacactgaccgcccagaaaaaaaacaaaacgggaggctggcgctattccccggaatccacggacgcggacagcacggtgaccggctgccagatcgtctccctgttcgcggcgcgcaatgcgggcattcccgtgccggatgaggcctttgaacgcggcctcaagtatatggcttcctgccgcgacaagaaaggcgcctacggctacaccgggccggcgggtccccgcgtcaccctcacggccatcggttccctgacgctgtccctggcgcgccttaaaacggacccgtccttcaaggattccctggcctacctgaaaaagcacctgaattaccgggattccacttatccgttttattttgaatattacatgtcacaggccctgttccatgcggaccaggaagtgtggaaggaatggaattacaaaaatatgcgctatctgggagcctcccaggcgcccaacgggtcctggctttccgatcattccgcggcatattccacttccgccgccctgctctccctcgcgcttaattatagatttctacccatctatgaacaatagaatccgcctttccctgatgctggccccggcctgcctgctgaccgcctgggccaattccgtcatcgacgtggttacggataacaattaccgcctccgcggggaaatcatttcttacggaaaacagggcatcgtcatcaagcacccggccatgcgccagaacgccgtcattctcccgtcgggaatccgcgctctctactttacgggaaccgcctctccggatcttcgcgcccgggacaaaattttcatggctgcggggcacagggacatcatcccgtgcaatatcatttccatcacacaggacaaagtgcagtaccgggacatactgggccatgaacgttccgttccccgcagccaggtggccgggttccggctgaatacgctgcaggaaaagggcttctggcaggaaccgctgatttttgacaacagctgggtttattccggcaaccgggaggaagactaccgcacccaggcggggagaaaactgatgaatgccctgaagccgaaaatccagggagacaagtaccagtaccggctgggcaacaatgattaccccacctggatacccctgtacaagaatatcggcttggatccttcctcctttacctttcgcaccaccatcaccatgaacggcaataatgaccgctccggcattgtcttctgtttcggggggaatgaaaatattcctttccggtccaattccggcagcaacctgaacaggctcatgctcagcatctcgcccggaaaatgcaccctgctccgggaacagaagtccggcatcctcgtgctgggggaagcggccattccggcccccattctgacggagggcgtggatattcaattgacagcctcccgccagggtggaaacaagcaggtttacgagctgttgataggagatctgccgcccagactgataacagaccccagcccgccggaacagccattacagggagacgccttcggcctccagatggaagggcacgtgtccctgaccatcagcaaactgaccctttcctccatcaccctgagcgccaaatccgtggccaaaaacgggaatgcagagacagaccttgtcctgacaaaggaagaagacgccattccgggttccgtcagcggttacgatagcaaaaccggaacgctgacgctttccacggacaaggattatccgggcattccccgtgatctttccatcccgtccaagtacctggataccgtcttttttgcggaacagaacaggaaagacgactcccgccccccagcccgccacagcctccagatgaaggacggttcccgcctgcacggagatattctgagcatggattccctgaatatcatcctgcggcatccgcagctcggacagatttccctgccgctgaaaaacatcacccgcgtggaattcctgaatcccgcccagccatcccgttccactccctgattgaccccgccatgaaacaagcaatgacgcttttcctgtgcgcctgcgccctgccgaccgccctccttctgccccatgctcgtgcggaaggggtcattacgcttaaatccggggaaaaactgccgggcagcatggatacgatgaaccgcccttacctaaaggtccgttccagcattctttccaaacccgtggatgtccatatgggggagcttgacgagctggtctcttcccgtccgctggaaataccggaacagttttccatcatcaggctggccaatggggacgaggtttacggcaccctgaaggcgctggatgcggaaaatcttcaactccaaaccgcttggggcggtctgcttcaggtggaccgcaaatatgtgcgccacattgggttcgactcacagaaagcctacctgcgcaacgctacggaatccctgcagggctgggagtcttcagccaaaagcacgctgcccgaatgccgcaacggatactggctcatgcgcggctccaataatacggaactgcaaacttccttccccatgccaccccgcctccatgtgcagttctccctttaccataccaatacgttccggattaatcttgccctctggcaggattccgaatccggaaacagcatcaacctggatctctccctggaaaaagcggaactttccaagaacagttccggccagtaccgaacgcttggcagggtgaaaaggaacacggagcggaactggtatgccgacaagagcgtcaagcgttccgacgttcatttttacgccgatccggaaaagggcaattattacctgtacgtcaacggtgaacaggtagcctggtgggaggaagtcaaagagatggacactatctttgaaaacgagagcggagacgatgaaggggaagatggagaaagcgccgggaaacacgaattcaaaccgggaaacactcttgccctgggaggttatgacagcttgaacatggccgtgttccatttgaatgtatttgactggaatggagccattccccatctggaggaggagctggacatcatttcccgttacgacccggccgcccccagagacaaggctctgctggtaaacggagacgtgctcagaggaaccatttcccttcaggaggaaggctccatccgcatcaagtccgaccattatgacgtcaccattcccaccgtcagggtacgcgcactgaaccaaaaaggccatgaagagaaagaccttccggaagacagctcagacacccgcgttttcctgacggaccagagcgtcctttccctggccctggaaactatccggaacgggttcatggaagggcgctcctccgcagtcggcaaggtccggattccgctccaatccgtcagaaaggtccagttcaacctgcaaaacccggagctgaggaagcagagggaaacgccgttccggtacaaataaaggctctccaccaggccgtcctttccggagaaagccggctccgggaaagccagaagaagcatccgttaccgctcctccatttcctccgcgcgccgtacggcgcttttcaccgcctgaatccaggcattgcggaagccgcattcatccagcgcattcagggcggcaatcgtggtccctccgggggaagtgacctcatcccggagcgccatgggatgcttcccggtccgttccagcatcagggaagccccccgcatggtttccgcagccagccccaaagcggttttcctggacaatcccatggctacccctgcgtctgcaagcgcatccagagccgtaaacatgtaggcagggccgcaaccggaaatggcggaaacggcattcatcccggattccgccaccttgtaaacggagccgcagccggaaagcagcatccgggcagcctcttcatcttcatcttttacgccgtttcccgtactgtaggcgatgacgccggccagcaccatgcacggggtattgggcatggcacgtataatgcgcgttccgtcgctggcgcaggcttccatatcatccagggaaacggcggctgcgatagaaatcagaaggggaagctccgccccccgttcggaaagagaggaaatgagcgaaaggacgccgtgcggcttcacggccagaatcaggacttccacggcgtccgccgcatccgcctccgaggcagcttcatgaactccggggtattcctcctgcagggcctgcacgttttcatgatgatgatcgtacacccaaacttcctccggaaccgctgctccggctttcagcatgccccgcaacagggcgcctcccatttttccaagtccgatgatacctgttttcatggttgatgattttttacagtcaacatataagcgatttatagaaaatggaaatgccaatgaaggcccatggctatggacgagaatgccccatttccgcgtttgttccctccggccctgttatcaacgtctctggctggacatgcggttgggattttgcgtactgggccgcgttgcagaaacagccctcaatatggtcgttgacaaacccggttgcctggaaaaacgcataacagatcgtcggaccgaaaaacctgaatccccgccttttcatgtccctgctcatggcttccgactccggagaaacagcgggaatctgagccagagcgctgaaatggttaacaacgggctgatgattggggaaaaacgacaagacgtaccggtaaaaactgccgaattcttcctgaacggccataaacagtttcgcattattgacagcgctgttgattttcaaacggtttttgacaattccatcaaatcgcatcaaccgttccacatcttctgccgtcatccgcgccactttctccacatcaaagccatggaaggctctccggtatccttcgcgcttccggaggatagtaagccaggataatcccgcctgggcgctctccagcaccagaaattcaaacagggttttgtcatcggaaacaggcctgccccattcttcatcatggtattttatgtaaagttcatcggttccggcccagccgcaacgcgcattgatgatatccttcatacggttgcgccttagaattcctttttcctgaacagccacgccgccagcgtcatgtgaaagacgaagtatcccagcgtaatcagggccagggttccgaacagggaaaggggaataagccgtccgttcagggcggaatccgtcacggaataaatctggaaattcggaaaaaccagggaaaagagcctgctgcccgccacttcccaccaggaaaggccatccgtgccggatccaacccacagggaaagagcctgcgtctggaacagccccgccagatagatcatgaatgtcagcagcgcactgataatggtgccgttcgtcacgcaggacatcaacagcgtgagggaggaaagaacgacaaactcgcacatcatcacgcccagccccgtctgcacgttccaggtagctccctggaggcggatcctgtccaggtacggctgcatttcctccaacgtataacggcctttcagggaggctatctgctccgcaaccaccgtatccgtccgcatccacagcaccagcgtcattacggcatccatcagcagcacggcaaccagggtcagagccagcacacccagcaccttccccatcagatagtcgatgcgcggcaccggtttgcaaaggatggtgtatagaatacggtcctccgcatccctgggaataatcagagccgtagccgccacgcagaaaaagaggccgaacacccgcatggcgccgtaggcggagtttttcagcagcacgagttcattgattcccccggtttccggccccagcaccgcgctcaggcggaaggaactcagagccagcagcgccacggcgaagagcccaagaaagagaaacaccttcatgcgcaccagctgcgtaaaggtggtaccggcgattacggccatgcgccctggcgaaggtatataaccggaggtaatccatgccatgcggatcatcttgccgtattccggagcaaataaaagagctttttatttcatgtgctgaactccttccgccttgaagaagcgcttctcccgtgttctcatggagcgcgtatgagtttacgatcccagctggaagaactgctcccggaacttttgccttccgatccggcccaggccattaagggaacagaactcatccgcctggtgcgcctgaggctgggggaggaatattcggacgcatccctgcgctaccatttttctttcatggcttccgagccggattcggaaatcgccaaggtggaacgcggccagggctattacaggcgcatgagggaacgggacgggcagcgcgctcccagagggcttttgcccctgttcctcggggaaaacgaaccggacgccctgaactgccgcgccaaggcgctggccctggccgtgcgccagtacgataccacgggccgaggcgttttcgtgttcagtaccagtgaaaccggaacttcctgggtaaagccggatctggccgttgtggaatggccggagggggaatgggagggaaacgcgcttgtttttgacaaaagcgcacttcagcgccgccgcatgatcggggcacccatgatgggcatccgcagcgtctgcgtagcccgcatgcccggtggagaagacggcagaagggaatttttcaggactctggccacgtcccgctgggcacagtgcggagaactggtcattgtgggggaactgccggatgattccgaatgcgccgccctccgcgggctggccgccgagttcggcgtaggggtgctttgcctggaaattgcggacgaacgcctgggagaactccccggcgcggaggaaattttcaaagccggagatgaagaatgcgccgccctgctggcggagctcacgcccgtacggctggccgccggaaggctgaagacgctggaggctgatacgggggaaaccctgggcggggaattcggagccctgttcgactggctggccgcctgcctggaacgcggcagcgtggaagaatatgaattccgcgtctcctgttactgaatgcggcggagagattcttgacagaacttgcgtattaaattaaagattttcccggctccaacccgccctctcctctgacatggaacaagaaacactggtttacccgcttgcggacaatactgttctgcaagacaaatatacgatattgagcgtgctgaacgccggcggcttcggcatcacgtacctggctctggacaaccccggttcccggtatgtcgtcatcaaggaatgcatgccggacgcctacgcctgccgggatatggaaaccggcgttgtccatccccggaacgaacagaccgccgtcaatttttcccagagcgtttccaattcccggcaggaggcttccgtcctgtcccagctcaaccatcccggcattgtccaggtgtttgacatgtttgacgccaacggcacctgctattacgtcatggagaatatccagggacagaccctgttcgacctgatgaccaccatgcacgccaccgggcaaaccatggaaccggcccaggccacggatcttctgttccgcctgctggacatcctgcactaccttcactccatgggtgtgtaccattgcgacatcaagccgagcaacatcttcatccagccggacggaacgcccaagctcatcgacttcggcgccgtgcgcaccaagaccctccagcatcaggggctcgtccagatcacgcccggctataccccgccggaattctaccccggacgccggagcgaaataggtccctggtgcgatatgtacgaactgggcgccacgttctacgaattgctcacgggccaggttccccatcctgcggaccagcgttccgtggtggaccgcaacccgaaagtgaccagttacgcggccctgcggaaaacttatcccatgaacttcctttccggaattgacaaagccctgtcgccggacgaacgcaaccgcttccattccgccaaggcatggaatgactatatcaacgccatggcggcggcaggcaccctgcaggccggcggagtatcgaggaaggctcttccccaggccaggaaaaaatcttccgcaggcacggctttcctcatcatcctgctcatcgcaacggcaatcggctgggtatgctggaaacagggtctgcttaacttctgattccggccgctttccggcggaaacattgaagggtgatgtccgcaaagacacgccccccaacgcaacaagggctgaacctgacggtccagcccttgccaatccggaattgaacgggagaaccaacctttacaggctttccccgaagtcccggcggtatttggccgccagtttttcaggccagtcgctcttggcgcggagcttgcccatgaagaagcgcaggacgggcggttcctccacaaatcccaggccgccaatcaaatcgcggttgtcatagagccacttcatgcggtccgccacgtatttcacctgggataatgtgaagacacggcgcgggaaggccaggcggagcagttccacatccgccagaatgtccttgccgttttcgtcgcggacgctggaaagcgtgccgcgttccatgccgcgcacgccggaggcgatgaagaaagccgccgccaaagccccggcgggatagtcctcctgcgggatatggggcaggaaacgccctgcgtcaatatgggcgcccagaccgccagcgggggttacgcagggaatgcccatgtccaccatctggccgatgaaatattcaatgaaggaggggctctgggaaatcacggtcaaatccgtggtttcatacaggcctacggccatggcctcaatttcccgcacggagatgccgccataagtcaaaaagccttcaaagaggggaacgagatgctccattttcttggcaatggcccggtcgttcgtgcagatgccgccgccgcgggaggaggaaaccttgcgggcggaaaaatacaccagatccgccagtccgcacatggtcttcaggatgtccgcgcaggacgcatccctgaactcgtcttcacgcatcttgatgaagtaggcgttttccccgatcagggaggcgtccagcaccagcatgatgccgaattcatcgcaaatgccgcggatttcccgcatgttggcaatggagaagggctgaccgccaatcaggttggttgaggcttccatgcgcacgaaggggattttgcccgccccgtgacgggcgatgcagtcccgcagcttgccggggtccagattgcccttgaagggattggtgctgaccggattgacggcttcatcagccaccagttcctcaatcttgccgccgttcaggtcaatatgggcgtgcgtggtggtgaaatggtagttcatcggaaccacgtccccgggcttcacgaaggtgcgggcaatgatattttcacaggcgcgcccctggtgggcgggcagaaggtattccttgccgaagacatcccggacagcctgcttcaggcggtcaaagctctgggaaccggcataggcgtcatccgcccggaacatggcggcgatctggttgtcgctcatggcgttaacgccggaatccgtcagcatgtccagatagacgtcgttcgtgctgagctggaaggtgttgaacccggcttcccgtgcggcttccaggcggcgttccacggggacaagatgcagcttctgcaccacgcggactttatgcagttccaagggaatttgttccccattgtaaaatttgacaacgttggatggttctgaattcataaaataaaaggtaaacaaaagtgtagcagaatgaatcttttccgcaacataaaaggacaaacggcctttttttgcctcccgccgtaaaggcaggaatgacgctggaaggaaaaatgtggaactttccggagggagtttctagcgtggctccctatgaaaaaatactggaaattgattcaacagcacctgggcgtggatgcggacggcatccccggccccaagacggcgctggccctgctggacaggctgggcatccgccaaccggaacaatcctggcccagccaggaggaagtgcgctccgggaaatccgtcttcggccgtgcgggtgatgaaagcaacatgaccagcatcaagctgccttatatcatgcggctggcgtgggaaacaaacacgaccgtttccaccatgcgctgccacaagctggtggcggaaccgctcgtccgcatcttccaggctactctggaccattacggcatggagaaaatcagggaactggggctggacctgtacggcggctgcttcaacaaccgctccatcatcggcggaaaggccacatccatgcacgcctggggaatcgccgtggacatagacccggacagaaacggcctgaacatccccgcgccgaaagcggtattgtccggaccggagtacgccgccttctggcaattcgtggaagcggagggggccgtatccctgggacgctcccgcgactacgactggatgcacttccagttcgctactctttgaccggagtggacgcgaacgtcctccagccctcctcccagcggcggcggagggctggccagtcctcaccgttccctccatgccccaggaaagagcgctttttcagctcccggaaactttctccgggaaggtggagaagttccccgcggtcataggcattctgatcacacatgccgttaaaaacgggagtccactgccagcggcgcacgcccagataacttttgaatgtatctaccagttccgtcgtgcagttggcggtgacggtatgataatagcgcgggcgttcatggaggctgttgattttttccgcaaaccccagaaaggcctttttcaggctttccctgtcaatgttgatacggtacaggtacatgtcctctttccggtaattagtgcgcagggcgaacaggtcttcttcgtccgccaggatgtaaatcacgttgaattgcttgtaaaggccagggacacttccctgctccaccccttcaggcagccgcgtttccacggacagggccagatgcttcccatcctcaaaaccgaaggacaacatggtatgggccacgaattccatcccatcccagtggctcacggcaaaatccagcgtagccagcttgtccaggtcaaagcggcgcgtcacatagcgcgcgtcgaagtcccgctccgtccggtagataaaactgcgcacgtccttcaccacgatttcatttccgttgatttccacggagggcaggcgactccaggacggctgccattccttatcgttcgtcgccggtatgcacaggtagtacgccagcaacagggccggcactccccaggaagcgcgccataatacgggccgttttctgcggagggcgaaagcgcacgccatggccgccacgtacaaccacaccagcacgggacctccccatacgttgtaaaaaaccacgcccgccgcccatacggagaggccgaaccacgccgccatcatcagaatgcgggcggcggccaggcccgcgtggcgcaggaaagtcaaatgcatgaaaaataaaaagcaggccgcgcgttccagctcatgaaacgcgcggcccgttaacggaagttacctgaaggaaaggcccttcactttatccgtcagggctttcagcacgcgctggtgcgcggcgtccacttccgcggccgtgagggtcttggccggatccctgtacaggaaggtgtaggcaatggatttgcggtccgccgggagtttttcaccggaggggtccgtgaacacgtcaaagcaggaatagctgacaagaagtttttcccgtgcggattccacggccttgacaatgtccgcattgggcgtggagaggggcagctccatggccgcatcgcgggaagagccggggaattggggcaattccgcagccttcacgggcgcggtgaggatttcctgcattttgcggagatccagttccgccacgtacacgggctggcccaggcccagctcccggcagcgcgccagggacaggcgggcgaaatagccgcaggctttcccgtccagctgcacatccgcccccagggcggcctgttcgcgcggtttggcaggcgtaagcgtaaagcggtggcccggcgccagagcagccatcacggccagaaggtcctcaaaggaggcctgctccggcttggggtccgcccaggagcgcgccgtgcggtccccggaaacaagaatgcccagggtatccgtttcaatgtccctgcccttgccgccgcccgtattgcggaagacgcggccaagttcaaagaagcgcaggccggacacgccctggttgctgttgcgcacggcggcggcaatcaggccgggcgtatgggcgggacgcagcacggagtgatcctcgctgagcggcagggacacgcggatgaggtcaccgtcctgaagggggcgcaggggcaacgcgtccttcacctgggcaatggcgccgtccgcggattcagaggcaatgagcttgatggtctgggtttcataaaatcccagggccgccagcttgcggcgcagctccatctggaaattgtaggccgcatccaccggggattccgccacgaaggggccggagaagcgggacggtatgccgtccaggccgaagacgcgcacgatttcctccagcaggtcgcacggacgcgtgagatccaggcggtggggggggatcagccagcattcaggagattccggaacctgcttcaggcccagcgccgtcaggatgcgtgccccttcctcatgggaaatggaaccgccggacatctgatccagcgccttccagggaagttttacaaagcccagttcattagtcaccgtggcgcccttcccctgcttcagggaagcgggcacggaaacggggccgtccgcccccccgcaggaaggcatggaagcatgcgccggattaggaacgggagaaccggccacatacgtcggggaagccgttccgcccgccagctggagaatcagttccacggcgcgcacggaaccgcgcaggacattccaggcggaagtgccgcgttcaaagcggtaggaggagtcggaggacagggccagcctgcgggatgtggcgcgcacggaggagggcttgaaccaggcggactccagaatgatatccgtggtggcgtccgtcacgccgctttcctccccacccatcacgccgccgatggcgagcgccttgccggactggtccgcgacaaccaggtccgtgcagttaagcgtgtattcctggccgtccagagccttgaaagtttccccttcataagcggtgcgggtaacgatgccgccctgcactttcgccgcgtcaaaggcatggaggggcgttcccagttcatgcaggacgaagttggtaatatccacaatgttgttgatggggcgcagaccgacggctaccaggcgttccttcagccattccgggctttcctgcacgttcacgccgctgatttttacagcggtgtagtacgggttcagctccggctggtccagccgcacgaagtctccggcgggttccagttccaccccggcgtcgtcaatggaaacgggcctgtactcccggccggagatagcagccagttcatacgccatgccgttgtgggaaagcaggtccggtcggttgggcgtcacttccacttccaccagggtatccgccttgacaacctgggaaataggcgtgccgggttccagttcctgggggagaatccagagaccgtgctccttgtcgggaagccccagctcggaggcggaacagagcatgccgcgggactccacgccgcgcagcttgcccaccttgatttcaaagttgccgggaagcaccgctcccggcagggcgcagggcaccttgtcccccactttgtaattctgcgcgccgcatacgatctggtgcagcgtgccgtcgcccacgtccacctggcagaccttcagccggtccgcctggggatgctgttccgcggcggccacgcgggccaccaccacgtatggggaatccacgccctgctggcggatgtcttccacctcaatgccggcaaaagtcagcatgtcagacatttcatccacgctcaggccggacaggtcaatgtactgggaaagccagttaagggaaatcttcataacgggaaaacagataaggattattggaattgggcaaggaagcgcacatcgttctcaatcagggcgcgtatatccctgatgccccagcggatcatcgccaggcggtccagaccgatgccgaaggcaaagccggtcagccccgtgtagcgggcctgtgagcgggggtccagccccagttcacggtccacggcttcaaaaacattgggatccaccatgccgcagccggcaatctccacccagcggggggcctggccgtccaccttcagcttgacgtcaatttcaaaactgggttccgtgaacgggaagaaatgggggcggaagcgcacctccgtgccggagccgaaaagggcgcgcagaaaatattccagcgttcctttcaggtcgcccacggaaacgtccgtatccacatacaggccttcaagctgattgaaggcggaaaggtgcgtagcgtcaatttcgtcgcggcggtaggcggaaccgggagcgatgacgcgcacgggaggcatctgcttttccatggaacggatttgcacggaagacgtgtgcgtacgcagaagcttgccggaatcaaagtaaaacgtatccttctcattgcgcgccggatgatcctccggcgtgttcagcgcgtcaaagcagtggaactcgtcctcaatctccgggccgtccgccagggcaaagcccatgtggcgcagaatgcggacggcttcatcccgcacgatggtgagggggtgcagcccgccagacggcagggagcgggccggcagcgtcaggtccaccccggccacagcggccttgtccgccagggcctgcacttcttccagcttggcgtccagggcttccgtaatggccttgcgggcctcgttaagcaactggccgacggcgggtttttcctccctgggaacgtccttcatacccgtctgggccagggtcaattccccttttttgccgaggatggccacgcgcgcgtcttccacgccgcgcctgtcagacgcctgggcgatgcgctccagagcgtcccgttggatgcgtacaatctcttccttcataaaatttgacgggcaagagcttacccgccccccccgccagcgtcaagcccttcgggccgcagggacgtcactcaagagaaaatggcggaatacggaaaagagggaaagaacaatgaaccccgcttcctaatcactaatacttaatcatgaatatctccccagaaaattacacgtatcccggccgagaggacatgcggccggaaaccatgccgagcacgcagaacaaggtataaaccaggcagaacggcaggaaggagcctccctgatgcaggaaggaggtaaacagcaggctcaacagggcgcccatggtaaagccgattccctgggacatgccggaaagcctgattgattcggaaggcgtccgggcccgttccaccatcagcgccattccgcggctgaatacggttcccgtcgccaggccgaacagaatcgccatccagacggcccagtccagcggaagatacaggatgccccagcaggaaagggccgccaacgccatggccatcacgatgaggaggccccgccctcccatagctttttccagcacgtgagcggagagcgtagcgggcagctgggcgaacatggccacggaaaggatgaaaccggcgtcctcatagctcatgccccgctgcctcagaaagatgggaatccaggtataaaagaaataggcagccccaacgcggctcaaataaaaaacggtaacctgccatgccttgccgctgcgcagcaggctgcgtccggatgccgccggatcgttttgaaacacgccgtccggatgcctgagaaaataagcgccccataccagcatccccagcaggatgggaataatccagatccccaggccgaaacgccagcctcccagcatattggaaaggggaacggacaggccggaagccgcagcgctgcccacgccgatcatggcgctgtaaacgcccatcatggcggaagcacggtcaggaaactggtgcttgatcagtccgggaatggccgctccggcaatccccatgcccagccccatcagaaccatgccgccgtataaccccgccacgccgtcccagctgcgccagaaaattccggccaccgccagaagctggaaccagaaaatgattttccacggcgtcatccggcgcgccacgcgcggagaaatgggagccgccacccccagcacaaagacgggcagcagggcgaacagccctgaattttccagggaaagccccatatccctttcaatcgttcccaacagcggatcgggagaatcaaacccggtacgcagattaaagcacacgattaaaaaggcggcaaacaacagcatctttcccctgatgcctccggaagttcctgccttatccatcccatgttatacagcctctcccccgcccctgttcaaaagcaacagccttccggctgtcagcagtccggaagatacggtatggagaaaagaccatcaggatgagcaatccccttgcggttttccatccgccccccctgtcatgaaaaagcgccgccgtcccggagaacggcggcgcccgaacacgctaacctcttaagctttcatttgtcagggcgtctgccgtacaccagcgtacgcctgccgtcccaggaaacggcctcaatccgcgtagagccttccggataggggaccgtggtggaggaattatccctggaatccgtccccgccatggtgatgcggaccatctccctgtctttgtaggtttcaaagacgacggcgtttttccacacgtcatgggaaataatgcgacgattgacctgctccgtaacgccctggttatagacgccgcggacaggcaggcggttcttatatgcttccgcgctattgacggaaatatagtaaatgacggggctttccggctttttgtacttcctggcataggcaatcaggttcttgcagtcggcctccgtgatggtcatgcgggcgcaggtgtagtcgtccagttcctggtcaatgggcttgagcatgcccgttttccggaaaaaatccgtcaggtcctgtctggcggcgtcgcaggcgttcttcatgaacgcaagctggagctctccatccttcttgcccctggtatccatcttgatggccttataaaagatatccggataaaagtcgggattgcccttcccggctatcttgaagtacagctccagctgccacaggggagccagcttgacaaaatggtcgtgcaccatcggacggttatccccgccggaacgcttgtccggaccgctctggacaagccagttttcccccttcaaaatgccgttgttcaagtaggcgttgaagcggccgccaatcatgttgccgtccccgccgttgatgcgttcatgctccaggcgcatgctggagggattcagcatgtaattcacgtaagcggagtaaatgttattggtcacttctccggtggatacccatttcatggcggggcgcacctggttgacgtggccgaactcatgggcaatcccccaggcgctgccgggaatcttgtccggattgccgacctccttcatggtaccgttatggaacgcggctcccgtaccgtccgcatgcatgaacccgttccagatcacacggccgaacatccggtttttgggcagcatcctgtacttgtacaggcccatgatctgctgctccatgccgataatcctgtcgtacagggcaatgagctcctcccctttgtccgggcagaattgtttaagttcctccaccggatacaccagatgcacgcggttgcccacgatgtccacaacttccgtgggggagttttccagcatcctcttccagtcgctgtttttgctgacgcctcccacgaaaactccattcaccttgccggacagaatggacagatgcaccttgggcgccttcttgtaattggatgtgaaatactcaatatagccaagccccttgttcttcgccctgatgatgttgaccccctctttcagcggataggagctgtggcctccgtcccgcccgaaattgtggataaccagattcagtttttcacctttgggatcccccatgaccagcaatacgtcctccccctcttcaaaaaagatgccggtgggattttcaaatttgctgtactggctggtacgcaggcgttccgccagatccttgaccggttcatacggctccgccgtcagggcgcgggccttgcggtcaaatttcttctccgccatctgctcggcgagcccacgcacaaagggatccttaattttggcgatgcggtcgcgcgtgacattgggcttcaatgcaagcatgtattcattggcgaacacattggaatccaatgccttcaaaccctcctccgtaatcggcgagccccctgtttcctgggcggaaagaacgccgccgcccaacacgccgcagaaggccagtaaaagaatcccctttttcaacaatggtgagaaaatcatttgttaaataatactgttcggtttccggaattgtttcaaggaaaaacgcccggcccccatgcctgtgaaaaagcctttttgtgtgacatgggacgcccgggcccagggagaaaaactgtccatcccccttgacgggggccgtataatgacgctcgcaaaacatttttccatatgaatacagaaacacatcaatttcaggcggaagtccggcagctgctggacattgtcatcaacgccctttacagcgaccgtgaaatctttgtccgcgagcttgtttccaacgcttccgacgccctggaaaaactgcgtctgaagcagctgacggattctaatatttaccagccggacaagcccctggaaatcaccgtcaccacggataaggaaaacaagaccatcaccattgcggacaccggcatcgggatgacggaagcggacctggtggaaaacctgggaaccatcgcccactccggcaccaaaaaattcatggaggccctcaagcagaagcaggaaggcggagcggacctgattggccagttcggcgtgggcttctacagctcgtttatggtagcggaccgggtggaagtgttcacccattcctgtgaaccggaagccgcctccctgcgctggtcttccgacggacgggaaggctacagcatcgaaacgctggcggaaccgctggaccggggcacccgcatcgtcatccgcctgaaagacgaatatgaagaattctcccaggaataccgcgtcaaggaactcctgcgccgttactccaacttcgtggggttccccctcaacttcaacggagaacacatcaacaccgtccaggccatctggtccaagtccaaatccgacgtgaagccggaggaatatgacgagttttaccagttcatctcccatacggatgaaaagcccctgtcctacatgcacttcagcgcggacgcccctattgccctgaatgccctgcttttcatccccaggcgcaatccggaaatgttcgggttcggccgcgtggatgccaacgtgtccctgtactgcaagcgcgtgctgattgacgccaagccggaaggcctgctgccggaatggctccgcttcctgaacggcgtggtggacagcgaagacctgcccctgaacatttcccgcgaaatgcttcaggacaattccctggtgcgcaaaatcagcgacatcatcaccaggcgcttcatcaagcatctggaaaaactggcgaaggacgatcaggaaacctacagggaattctacgcgcaattctcccgctacctgaaagaaggcgtcgtcacctcctggccgaacaaggaatccctgggcaagctgctccgttttgaatccacgtccacggaaccgggggaaacgacctcatttgaggaataccttacccgcatgaaggaagggcagacggccatttacgcgcttaccggcccttcccgctcccatctggaaaacagcccgtacctggaagccttcaaggcccgcggctatgaagtggccttcttcacggaccacggggacgaattcgtgctggactccctgtccagcgtggacggcaagcccgtcacgatgatcgaccgcgccgacgtggaactccccgccctggaagaggaacagaaagacgccctgccccaggaggaagccgcggccctggaagaatggctgaaaggactgtacccggacaaattctccaaagtcaccctgggcaagcgcctggtcagcggagccgccgtagccctgcaaagcggcaatgacatggggccggaaatgagggcgtacatgaaagccatgggtcaggaagtgccggaaagccacccgcagctggaactgaacccctccaaccctctggtgaaaaagctttccgccctgcggacggaaaacccggaactggcgcaaatggtggcggaccagatcgcgaataccgccctgctccgcgccggcatgctggacgatcccgccgtgctggcccagtcctcccaggccctgatggaacagctcctgctgaagtaggggcccggaagaaacagcttccttccccaacgccgctcccagccctccccgccgggggcggctttttcatttctcttcccgccatgaacgcgttacgccacatgccccgccatgttctattcctgaggctggcctatcaagcgggcatgtgcctgctggccctggtcgccgtaacgctgaccgccattgacctgaccacggaagcggcggaatgggaagtcacggcggaccgcaccatctactggatttttgtgctggattatgtgatccgcttctccatcagccggtccaaatggctcttcgttaaggaacacccctgggatttgctggccattattccctttgatgccctgttccgcctgttcagattcgcctcgctgggagaaatcttaaggctcgccagatatctggacctgttttcctatgccatgaggttcaccacgcgcatccggcgtttcttcaacacgaacggattcaagtatatctgcatcgccgccctggtcatcatcctgctgggggccgtaggcatccatctggcggaaggcatgagcctgcccaacggtatctggtggtccttcgtcacggctaccaccgtaggctatggggatacctatccggtcactacttcaggcaaatttctggctgtattcctgatgctcacgggcatcggattcgtgggaacgctcaccagcaccatcacgtccttctttctgagtccccacggcggagaagcgctgccgtaccgggaagaggaaattgaagacattaaaaagaaactggacgacctttcctccatgacggatgaggacatagacaccatggcggccctgctgaaaacccttcgggacgctccccattcccctactgaagcagaaaagaaaacatcaccgcccggctcttccacaacctgacgacagggcttcctcagaggcgcgaacaaatctgcggaattataaaaagtcccctattccctccttcggcgccacaacgccgccgtaatccccagcagggataaccccgccgcaccaggctcaggcacctgggaaccaagatggttataatatatggaaaccatgccattgccatattcctccgcttcaacgtgtggattcttccaattcaccacgtgaagcactgacacaactgttgattttgtagttgtaaacagcaggtaacgtcccggcttcaaatcggcagaagccgttatatcccatttaatttcctgccattccataagtaccgtatactgtccaaaaaaattaaaagataaaacagcttcactcaaatttcgctctcccagctccgcatgcaaagttaaattaactaaagataaacgagggtgatagccggaggtaccattataatgattccccaaatatatagtattgcatcctttcaaataccaatcagaatcattattcattaccgtcccatcaatatcctcataaacagcctgatcatcattccagatacttttctctatgtagatttcacttgcccggcaaactcctcccaaaaaaccaaagtgaagaaaaacacttagaagagccgttttcgccattttccctaataaatttttgaaatattgttccatgggcagaggtataacggattcctaatccgtacacacttcttcaaggatttagaacaaaatccaacatattcgcccttatactctgctgtaatcattgccctagatattttcgttcttgtctgattttcatatttatcctcatcacatttcaagcttgcatacggattaggaatcctctgctacaacgttcttcatgaacataccgacttcctctttcctcaccgacacggatcagacaggaatcctactcatccgttccctgggcattcctcccatggacgctttccttcttctaaaagacctcctggacaccagccgcggcagaggcgacagaataacccgggccaaacgatgcatacggctgggaggagaggcccttgccgacagggaaacaagcgtgccgttttcccaggctgtccgcgccagcctggaagcaaggaaacaccgccggccccgcaccctgcaggaaatccgctatatggctgcccggatgatgaaaaaatgcccggaactgacaagaaaacaggttcgttccatcacgccggaagattgcgagcgttatctccgcaaaagcttttccactccccgccagcggcacaaggggcggctgatcctgagcggcatcctgaatttttccctgaagcgcgggtggtgccgcagaaacgcggcctttctggttcctccccccatcctcagggaaaaacgcatcagggccctttccctgtacgaggcaaaacggcttctccacaccgcggaacagttgttccacggggcatgcctgccggcctgcgccctgatgctgtacgcgggcatacgcccccacgaagtcaaaaggctgacctggaagaacatcaacctgaaatccggcctggtttcactggcgcccagccataccaaaacaggcgggagccgccacgtttccatccttcccgtgctgggcgccatcctcagccggacgtcttccgccggttccccctcccgtcccgtttgcccgcccaactgggaaaagaaatggagggaagtaaggcgccggtccggcatcctgaaaaaaagcggatgggtgcaggacgtgctgaggcatacctacgcctcctatcacctggcccatttctgcaatcaaaaccttcttcagaaggagatggggcactcctccccctccctgcttttggcccgttatcttaacatggacggaatcacctccgcaaccggcgccatgttctggacgtacagcttcattcctcccgctccgttaaagaaagactgacaaaaatccgtctggaattgcgcggccaaagacggacatccaccttgcgtcatcaaaccggaggcgtatttattttgtcttgaatccaaaataaggcacagtacaatcctttgcggacagtatcgtaaggcgtattggttttgccttgaatccaaaataaggcacagtacaataatcatccaagggggacaaccccggaacagttttgccttgaatccaaaataaggcacagtacaatcgccgccttggtgacatagactacttagacgttttgccttgaatccaaaataaggcacagtacaatagaaatcctttgtattgtcccgctaaatagttttgccttgaatccaaaataaggcacagtacaatttccacaggttcccccgtagaactgtacttgttttgccttgaatccaaaataaggcacagtacaataggtgtatctgaaggggaatcaaaccctacgttttgccttgaatccaaaataaggcacagtacaatcccaaaactcccctcatttgagatgatatagttttgccttgaatccaaaataaggcacagtacaatcgggaatagagcatgcccatcaagccgtcgttttgccttgaatccaaaataaggcacagtacaatattttcgtccaccacgggctgcgccactttgttttgccttgaatccaaaataaggcacagtacaatgggtgcatgcgtttaaagtggttagcgagggttttgccttgaatccaaaataaggcacagtacaatcggcgggcagtcctgcgccgtaagtcacgggttttgccttgaatccaaaataaggcacagtacaatcccataggtctcaccttcagcgggggttaggttttgccttgaatccaaaataaggcacagtacaattagtagtattattatcttctcttctcttctgttttgccttgaatccaaaataaggcacagtacaatagagacacggcccgcaacggctatacggtggttttgccttgaatccaaaataaggcacagtacaatcgataaactcgtagacctttacacctcctagttttgccttgaatccaaaataaggcacagtacaatggaacagagtcggaagcctaatcaacctcagttttgccttgaatccaaaataaggcacagtacaattccttgtcggacatgttgattcgggatagggttttgccttgaatccaaaataaggcacagtacaattttccaaaaatgggaactctggaagaagcagttttgccttgaatccaaaataaggcacagtacaatccggtatccgttgcacccttttatatatatgttttgccttgaatccaaaataaggcacagtacaatgatccgaaaatggaaacggaagacgattcagttttgccttgaatccaaaataaggcacagtacaatgcggtggacaaagaacgcaggactaggacggttttgccttgaatccaaaataaggcacagtacaattagccatgcaacgggaacataaccgtatgcgttttgccttgaatccaaaataaggcacagtacaatattttagtttatcggattttcctagcttgtgttttgccttgaatccaaaataaggcacagtacaataaaccaaaaccaaaacatcaataggtatatgttttgccttgaatccaaaataaggcacagtacaatatcaacatgtccgacaaggaccaggtgcgggttttgccttgaatccaaaataaggcacagtacaatagccaattattatgacatttcctcccggcagttttgccttgaatccaaaataaggcacagtacaatataaacgtccgagggaataaacctccatgagttttgccttgaatccaaaataaggcacagtacaatccttctacgtaggcaaaccgtttcgccccgttttgccttgaatccaaaataaggcacagtacaatgattgttccacatggaacatttccctacacgttttgccttgaatccaaaataaggcacagtacaatctttggtatcaaaaaacgacgcttcccctcgttttgccttgaatccaaaataaggcacagtacaatagatactgtgccttatttttatgttcagcgacttataaaaaaatacggcgtccgatatttttaccagaggagcatctgctgaggaagggaaacctcctgtcggggacaagacctgccatgaaaaacgaacatcttatcccactggatattcgtaacgaaaagacagcggacagaaccatcaggcggtatcattttctggattctgcgggagtgggtagctattctttcctgagtaacacacgcgcgggcatagacgctatactgaatcatcgtatagccgtcttctaaaagagccttacggaaatactgatagttttttttatcttccggcgtggttgtgggaagatcaaagaacacaactagccagcccattttatagttgtcatatgccatggttcatacggtccggattgcccggcaagaactgctttgcggaaactgcggcaaacggcctctaccgccgctttcaacggcatctgtttgttctggtgcataacagaagcctgcaaggtagctgtaatatgtcgcctgaactcacgggtgatttctcctgctctctcttctgtttttccttcctgcaggcacaaatgaatccaacgggccacattggcgtcaaaggcaggcctgaagggttccatcagatcataagccaaaggcgccgcatgttcccgggattgatgaaaaatgccgaagcagggatccagccccagcgcaaagagatattgcaatacgcaagacaacagaacagcgtacgcatagttgaagaggttattaaacccctcctcatgacgtcctctgcgaaaatcggagtttgcccatgtatccgcaaatacgctccagaacaggcgggcgcactctgcttccctcgccgtcttttccgtcacggccattctcttcagctccgcaatggcgggatgatgcggattccatacctgcgccagcgccgtctgattcccacacttggcatccagagtcttttgccagaggcggttccgcaaacgggccggcatatccgccagatgtcttaacagagcggtatccgtagcccgatccgccggcagaagcagcacggcaggcctgtagctttcacacagcacgaaccctattctcttcctggccagttctatcagcaaattgctcgtgagcgtcgccttaaaagaactgagcacaacagcccccacatcctccagcggaatcgtccggggaggattctctccatccacgcatctgagctgacccttgtcgcagctcagatggcatgtgcaggcatctatgctcagaatatggtatgacatgtaaaacgccttatcgtggagttcccgtataagaagtggggtatatctccaatcgatactttgttaatagtgtatcaagttttacattaatccaattaaattcatgagttttggccccgggaactgcggaatgaggtatttgaagatcaatagctatgcctctctcattatcttttatggatgcaattctccatacgcctgtacgcttgggatctttggaggaggttaaatgaatcaacatgccttttttcaagatacgcaccggcttgccgccgttctgttctttcagggccatgattcgcttaaacaccttaatatgtctgatcaccaccggcttgggatctaacgccactccataattgccatcaatttctatggccgccttaagagccttcaattttgacgggccttccggaaacactccgaccaatttgcttgcttttacctgatttttttccttcttcccatctttctttttggaaagagaaaccatggcatcctccccgcttccatcaacagaaagcactctctgtatggtttccttgagtaaagcgccgcccatgtctgcagggacatgctgaatgaccctctgctccatcaatttctcgcggatattttctttgatcccactaggcaaatccaccaatgatgctcccgtctggccatccttctcacgcaacttataataacgtttcttcctgagttccaggaagtcctgtttcatcttttgatccagacggcgcttgataatggcgcgtctcaacacgttttttctgtccgcaggaataatttctgagataagccccagcacacaggcatccagggcatgatgcagatgcgtgagagaacgcagatcttccttaataatcctgccgttgaccgggtctgcagcctccgggcacaattccttgaagaccccaaaaacatcccacgccttgcgaacttcagcagtaacagcgccgggaatcatgtcgatgtgcgcatccggcagagaggttttaatagacttgcatgccagtttcattaggtgggaactctgcgtcatcatgccttccgtcatgcctatttccttcatggcctcgtgattttgtgattgatgtttatgagacaatcccctcaccatcagtaaggctttgcgcttctttttgcgcctgcggtcatcttcatgccccttcttgtcatccaacttttcaaccaattccctgtacttattcagggaacgaatatgcaggttgggtttatccggcacaggattctcctgctcctgctccacaaagtcgtacccggtgcgctgacctttcatcctgttgactcccggccaggtaagaaccagagaagaaagcgcgttagactgccggaaagaatggggcacgatatgttccagctccagattttccagctcatgcgtgccatacgttgcgccggtgaacgggcatgtccaattcatgtccatggcaatgcggcacttgcgtatcaggttggcagaaagcgctttccccggcaactcccgttttaatctattgacggcatccgtatggcttttctggcgcagagttagttctctctgaatctttttgctgtccatggcggaaaacgttgtcagctccttgccaacttccacgcaaacgcgggagattctgtctttttgcccgccggcgaaatcttgaatcaaatccttcagcaagcgatccagaatcaacatacggtgacgcacaaggtggttgttggtcatcgtatcaagacggcgctctttctggtgctgattcacggaagaatccgtatcaaggaggcaatacaggcaaccgtcatgcgctttcagttccccatccggatgcgcttctctccgggcaggacgcgtcgggtcctctccatcaagaatttcttccaccacttttttcaagacggtgcgggcatacggcgcacgccccgtcgcatatttgggttttaacggcgtggcggcataatccagatctgtcttcttggctttctttcgattggcctgttgatggcgttctttctctattttcttttctaacgcctcgccagattccccacgagacttaagcaaattcaacaaatagtttggagtaacggacttcccgcgacgcaggcgattggcggcaattcgatacacagacggcgaaagaatttgcccgatgccgcttctttgcagaacttccacggcagggttcaggtaaagagcctcttcactgtcaggatgcaaagtaaaatagttgcttacattagtctctgtctcctttcccagacgggaagaaatagccttctccagagaggctttggtcaacttgccttcctgtcgggcctgattcatcaattctctgcgtatctctgcagaaagaggttctccgtctgcgcggatattgcataaaatccgggccatgcggtattcataaaattccgggcaattcgccgtgggcaccttggatagtttttctgcccgttcacgggcgctttgctcagaattgcctttcttcaactcagcttcatacacctgcgcccacgtgacagggcagcggctgatgatgcggttatcaaaacgggggattaactgcccgaacaaaagacttccacgataacgccgagccaattttatcccgtactgaagcaacacgccgcgctgttccgttgtcaggggatgatgctgcgcaatcaactctatgatctccgcagtcagcccaggaatcagaggcgcggaaagctccaatatgcgccgtacctccttttccacgattaagcgaggaaaggcggtattgagatttttataagccggcgttgaaacctccatcggagcatccgctttgccttcttccagtttcaactcccggcaaatggtttccgccatggtcgccgtcccatgtttatccatcaaatcttgagcatgcttcactctctcggtatcctcaccgttcccgccatcttctgaaaggctgttagaccatgaggcattattgtcgtaccctctgttatgagcataccagcggagaacatgccaaagctcaatcggggcgagagttcgatgcccttttaacgcttctgacgccaaataaaagggagcggggtgcccggaagtttctttcatttccggcgtgatgatttgcgcctgaaccagcaatctgccgatacgatcgatgcgaacgcgccgggagcggatattgcgtctcaaacgtctgtattcacgccttttaaatgcctgacaatcatctttcggaaacagaaccgtaccgcaaccgcaaaccgagggatccgcatcatcatgggatgcggaagcaatgacagcccatccaatggatgcataaccaatatcaaacgaaaaagtgagagaacgcgacatcacaaaaaaactgctttaattcatattatatgctaatattgcattccatcaagtattttaaaaattattccattcagaaaaaaaacagttgacaaaacatctgaacatcactttaattcccaacggattcaagacaaaatttgaaatgcaaaccgattttcctgactgccagccagtcacaccggtaacaaaagcatttttatcaaactgccatgtgtttcagcacatggcagtttttacaccttctgaaagttcgaaagactgacaaaaatccgtctggaattgcgcggccaaagacggacaattccctgcgccgggaacgtccggcgcccctctttttccaacctttccgccattttccaaccatgccagcaaccagccctccccgcgcctgggccgaaatagacctcggggccatccgccataacctgaatgtcgtcaagcaggcggccaaaggggaatattacatgcccgtcgtgaaggcaggcgcctacggccacgggctggaacaggtttgccgcacgctggattcggaaggcatcgctttcttcggggtggccaatgtgggggaagcccggcgcatcagccaggcgggctgccgcacccgcccttacatcctgggccccgcgttcccggaggaacgggaggaaatcgtgctgaacggctggcgctccttcatttccaccatggaggaagcagagcattacaattccctggcgcggctgtacggaaagacgctgcccatccacctttccgtggatacgggaatgggccgcggaggattcctgccggaccagcttgaagaactgctttcccgcctgggagaactggacagcctgcatccggaaggcctgggagcacacctgccctgcgcggacgaggaccgggaaatcacgctcaggcaaatcgccctctttgaacggatggccgcccgcatccgggagaaactgcccttgaagtattgccacctggccaacagcgccgcctccctggattatgaaatcccctccaacaacatgtgccgccccgggctggtgctgtacgggttttcccccattgactccccatgggcctctcaattaaggccggccatggctcttttttcccgcctgacggtggtgcgcacgctgccggaaggccacggcatttcctacgggggcacctatgtgacggaccatcccaccagggtggcgaccgtgggcataggctacgcggacggctacctgcgttccctggcccataagggcgcccgcgtcatggtggacggggtttcctgcccccttctcgggcgcgtgacgatggatcagatcatcgtggacgtcagccgggcgcctcacgcggaaccgggcatgaccgcagaaatcatggggccgaatattcccgtgacggaactggctgaaaaggccggcaccatttcctgggaaatttttaccggaataggcccccgggttccccgccattacaattattagactttcaaccggggaagaagcccgccattccgcgtggaaccttcattccctattgacgggcatccggaaatatcgtttatttaaccgatatgatgaaggtttccaccagaggacgttacgcattgcgcctgatgattgatctcgcccaccaccgcaacgaaggctacgtttccctgaaggagatttccgccaggcaggacattaccgtacgttatctggaacagattatcgccatcctcctgaaagcgggatttgtccagagcttccggggaaaggcgggaggataccgcctttccagacatccgcgcgaatacaccacggaagaaatcctgaaactgacggaaggctcccttctgcctatttcctgcacggctccccacgaaaatccgtgcccgcgggcggcaggatgcgccacgctgcctttctggcgcgggctccagcaagtcattgagaattatttgcgccgcgtaacgctggaagatctggccgagcagcagaaggaaatcggctgcgactacggagccggcatttaagcagcggccgcgggcctgaacatttctccaccttttcccattccggcccatgtcccgttttttttacccggagcttgacatgggcttttcttttcgttatctatttcctagttttccgataggaatataaaaacatgagtaagaaccatcgatttgaaacacgccagatccacgtgggtcaggaaagtccggacccggccaccgatgcgcgcgccgtacctatttacgccaccacttcctatgtcttcaaagactcggaacaggcggcggcccgttttgccctggcggagccgggcaatatttataaccgcctgatgaacccaaccgcagatgtttttgaacaacgcatcgcctccctggaaggaggggcggccgcgctggccgtatccaccggggccgctgcagtcacgtatgccatccagaacatcgcccgggccggggaccacattgtttcttcctccaccgtatatggcggaacgtacaatcttttcgccaatacgctggcggatgccggcatagaaaccactttcgtggacgcgagggacgttcagaatttttccagggccatacgagacaacaccaaggccctgtacgtggaaagcctgggcaacccgaattgcgacattgtggatatggaagcgctggcggaagtggcgcacgcccacggcatcccactcattgtggacagcacattcgccacgcccttcctgttccgccctctggaacacggagctgacatcgtggtgcattccgctaccaaattcatcggcggccacggcacggtgatgggcggcgtgattgtggacggcggcaaattcgactggacgcagaacgacaagttcccaggcatcagcaagcccaaccccaattaccacggagccgtgttcgcggaggtatgcggcaatctggcctatatcgtcaaaatccgggccaccctgctgcgggacacgggagccaccatcagcccgttcaattccttcctgcttctccaggggctggaaacactttccctgcgggtggaacgccatgtgcagaacgctctgcgcgtagcgggttatctggccgcccatccccaggtggaaaaagtgaaccatccctccctgccggaccatccggaccacgacctttacaagagatactacccgaacgggggcggctccattttcacctttgaaatcaagggtggcgcggaaaaagctcgcaagttctgcgaaagcctggaactattctccctgctcgcgaacgtggcggacgtcaagtccctggtgattcaccctgcctccaccacccactcccagatgacggaggaagaactgaaggcggggggcattacgccatccaccgtgcgactctccatcgggacggaacatatcgacgatattctggaagatctggaacagggcttccgcgccattctctaacgatttgacggcagcaacgctctttccctacaagccatgaaaatttacaaaaacattacggaactgatcggcggcaccccgttgctggaactgaccaattacgaacgcaggaacggcctgaacgccaccatcctggccaagctggaatacctgaaccccgccggcagcgtgaaagaccgcattgcccaggccatgattgacgcggcggaagccgccggagagctgaagccggattccgtcatcattgagcccaccagcggaaacacgggcatcggcctggcggcggtggccgcttcacgcgggtaccggattatactgaccatgccggagacgatgagcgtggaacgccgcaacctcctgaaagcctacggcgcggaactggtgctgacggacggcgcgctgggcatgaaaggagccatcgccaaggcggaggaactggccgcgggactgcccaacagctttatccccggccagttcgccaacccggccaacccggcagctcatttccgcaccacaggcccggaaatctggaatgatacagaaggcaaagcggatatttttgtggcgggcgtgggtaccggaggaacgatcacaggcgtgggcaagtaccttaaatcccgtaatccggacatccgggtcgtggctgtggagccgttctcctcccccgtgctgacccagggcacggccggcccccacaagattcagggcattggcgcgggattcgttccggaaacgctggacacctccgtgtacgatgaagtcatcaccgtcaccaatgaagacgctttcgccacagggaaagagctggcgcgcacggacggcgtgctggcgggcatttcctccggcgccgctctatgggccgccacacaggtggcgcggcgcccggagaatgaaggcaagaccatcgtcgtcctgctgccggacacgggggaccgctatctttccactcccctgtttacggactgattctttccattccttgtcatgaaaaaattcaacctccatctctacctggttacggatgaaccgtccaaatgccgctacagccttttcgaaaccgtccggaaagcggcggacgggggagtttccatcgtgcagtaccgctccaccaacccggatgcgggaacctgttaccgggaagccctgcccatacgggatttcctggcctcccgcggtatccccttcattgtcaataaccgcattgacctggccctggcgctggaagcagacggcgtccacatcggccagagggatcttccggttccatccgtcagagccatgatcggcccggataaaatcctgggactgtccgtctccaatgagaaccagctccgcgccgtggatgccgccctggtggactacctgggcatgggccccgtctttcccaccatttccaagctgaacgccccgcccgtgctgggcgtggaaggcttctccgctctggcttcacagtcaccgctgcccgttgtcgccatcggcggtctggacgcggaacgggcccggcaggtgcgcgccactggaacagcctccggaattgctgttgtctccgccatttgcggagcggagaacccggaagccgccgcacgggctctggcctgacgggcggaccgcggaaaatgccggacaccatcattttttaacgccatgctttcatcaacagaccttgttcaagccgttgccgccgatctggaaaaaatccgggaaacggccccgctggttctttccctgaccaattccgtcgtccagcctctgacggctaatcttctgctggccataggcgctgtgcccgccatgctcaacgacgcggaagaagcggcggacatgctccgcaacggaacaggcgccctgctggtcaacctgggcaccgtgacgcgcgaacagggggccgccatgcaaacggcggtgcgggaagccaaccggctgaatatcccctgggtgatggatcctgtggccgtaggggcgctctccctgcgcacgcggctggcggggcaactaaaggaacagtctccccgcatcatccgcggaaacgcttctgaaatcatggccctggccggatattcctccgtcatgaaagggccggaaagcaccagttccagcgcagacgccctgcatgcggccagggaactggccctgcacacgggggcggccgtgcttgttacggggcgtacggactattccacggacggccgccaggtaatcgccacggaaaacggacacgccatgatgtcccgcgtcacgggcgtgggctgttccatgggggcattatccgccgcctgcgccgctgtttcccccactcccctgcaggcggccgtttccacagccgtactcatgggcattgccggagaaatggcctttgaacagagccccgcccccggttcctttgccgtatcattgctggacagcctttactccctttctccggaagacgttgtccgtagagcgcgctttctttccctttaaccgtctccctcccccctggaaggttacgccgcattcatacggcctgatcctgccggctccggaggaggcaggcgcctcagctgaggctatccgggagaaagaaagctccggggcccgcctcgctggaaaacctgcgccatgctttcaggcgttacgcccacggagcaggaaacagcatcccggggacctgccggatcccgccacagccgtttgcctatcccgaccgccgagcgctaggactgcaagcggatttagtgttgagaaatacctgcggctccctataataaaaagcaatccatttcaacatggcaaactccactaccacgcaaaaactctgcaactggttcattcagcagtcgaacgccagggggcacgtcctgacgcccgtcaaactgaaccatctggtcattctggcggactggtggcatctgcaccggacaggcggttttctgatcaatgaacgggtggaagcatggccttccggtccggtactcccttccatttatcatgaatacaaggatcagccgccctactcttccatagaacatcccagccgccgccagccccctttggaggaggaaacggacatcattccctttctggaacatatctggaacttctatggcaaatatacggcccagcagctcggacgcatcaacaccgccccttcctccccatggcggcaggcccagggcaggcacgaacaggcgcaccgccagcaaatcacagaggaacatgtgcaggcgtactttcaaagcctggccggataattccggaaaaaacagcctgccgcttccctgcacagcctttttccaatcaaaacatatctttgagtaaaaaaaaacttgcaaaaaacggccggttccgctttaatgcgcccgcgctttcaaagcgtccgttacatagccctatagtgtaatcggtaacacagcggattctggttccgtattttggggttcgagtcctcatagggctaccacttctaataaaaaggccatctctccggaggcggccttttatttttttctattaccggctccgcgccgggcaacaaggagacggcaaaaaaatctggaagcaaaagatgattctttgacagaacctgtttcctccccgtttatattggaaatatggcacgtcccttatccattctcggcggcattctgctctccttctcccctccggcagaagcggcagcccaatacagcattatccctgagccgtccagaacggaactcaagcaagaaacagcaacaactttacagcttctttccgaccgggaagctccatccctgggaacggacgcttaccggctcacggtcacaccgcagggagcgcacctagcttccggaggaaaggaaggcagaatttacgggctggcaaccctccgccagctccgggaccagttgacggagcagccggagggcatcccctgcggcgtcattacggacgagccgcgctacccctggcgcggcctcatggtggaccccgcgcggcatttcatccccgtcaaggacctggaaaaattcgtggaccttatggcctactacaaattcaacaagctgcacctgcatctgaaggacaaccagggctggaggctgcccgtgcccggttaccccaaattgaaaagcgtcgcctccaggcgggcggaaagcttcggagacggaatcccccacgaggggatgtacaccaaacaggaattgaaaggcctggtggagtactgcgccaagcgggggattgaagtcatccctgaaatagacatgccgggccacaaccaggcgctccatgccgcctacccggaatttttctgcttccccaaaccggacatgaacgtgcggacgacagcgggaaacagcagggaactggtctgcccccaaaagccggaagtctgggaattttatgccgccgttttcaaggaactcaaagatattttcccgtccggcacggttcatctgggcggggatgaggcccctacggaactctggggaaaatgccctctgtgccgggaagcccggactaaaacaggcatgaaggacgaacaggaacaaatgagagccttttttgcgaaaacgacagttctgcttgccaaaaacgggcaaacgccgcaattctggtatgaggggaacgccggcatttaccatccgggggaaacggtttacgcatggcggcaagaccaggccctccagtccattgaaaagacgaaaaaggcgggattgaacctgattatggcctccaacgaatactgttacctggattttccccagattcaggggcagcgcaactggggatggatgaaaaccaccaccctgcaaaaatgttatgaactggatcccgcttttggaaaaccggagaaagaggcaggccatatccggggcgtgcatgcccccgtatgggcggaacgcctgccggacctggaccacctgctttaccgcgcctatccccgcgcctgcgccattgcggaagccggctggtcaccgatgagcgtgcgctcctgggaaaacttccggcgcaagctggccgaccaccgtcaattcatcctcaaacgcttcaattatgatatgaagcgcactcaggggaatgaaccggccttccgctgggaaaacaacaagtaatttcaccgtttttccttatcacgcatcccttaccatggtataatcttttccgaaatagttcttcatgatgtttaaactgcccctcatcctggcctgcgccatttttcccgcccacatggcatgtgccgccgaagcggacaaatacagcgttatccctgaaccggaaaaaacggaactgcagcacaacagtaccagaaccttgaaacttctttccgaccaggaggctccgtccctggaaacggacgcctaccggctcacagtcaccccacagggggcgcaccttgcttccggaggaagggagggcaaaatttacgggctggcaaccctccgccagctccgggaccagctggcgggacagccggagggcatcccctgcggcgtcatcacggacaagccgcgctatccgtggcgcggcctcatggtggatcccgcgcggcatttcatccccacggccgatctgaaaaaatttgtggatatgatggcctattacaaattcaacaagctccagatccacttgacggacgaccaagggtggcgtcttccggtgcccggctaccccaaattgaaaagcatctcctccaaacggaaagaaagcatgcgcaacggaattccccacgaagggatgtacaccaaacaggaactgaaggagctggtggcgtactgcgcagcgcgcggcattgaggtcatccctgaaatagacgtgccgggccacaaccaggccctggcggcagcctaccctgaattcttctgcttcccgaacccggatacgaaagtgaagaccgatgaaggtgtcaccctccacctcatctgcccgcacaaaccggaagtctggaaattttatgccgctgttttcaaagaactcaaagatatttttccgtccggcatcgtccatctgggcggggatgaagcacccctggaaaaaacctgggccaaatgccccctcagcatccagtaccgggagcaaaaaggcatgaaggacgtccacgaggaattgaaggaattcatcaaaaaaatgtcctccatgctggctgttcacggcaagcgcatccaactatggtatgaaaagccgtgggccagggccaacatctacaacaaaggagacaccgtcttcacctggcgcatgggactgactccatccaccatcacggagacgaaaaagcaggggctctccctgatcattgctgccggggaacactgctacctggactatccgcaacttccagggcaaaacaaccggggatggatgcccaccaccacgctggagcaaagctacaggctggaccccgcctacggcagaccagaaaaggaaacaaaccatatcatcggcgttcagggcaccgtgtggggagaacatctcccttccctgaaccacattctctaccgcgcctatccgcgtgcctgcgccattgcggaagccggctggtcaccgatgagcgcgcgctcctgggaaaacttccggcgcaagctggccgaccaccgtcaattcatcctcaaacgcttcaattatgatatggagcgcaccaaagaaaacgaaccgcctttcaaataatccgccctctctttttccatgagcaacatcaaatttgcacgtccgcaccgcccttccgtagaagaactggcccagggagtactggccggaaaccgcgccctgctgggaagggccattacactgatagaaagcaatgccgtccgggaccaggaatcttcccgcgccctcatctccaggctcttgccccattctggcaacgccgtccgcatcggcattacgggcgttccgggcgccgggaaatcctctttcattgaagccttcggcacttacctgtgcaaaaaagggttcaaggtggccgtgctggctattgacccgtcttcttcagtctcccgcggttccattatgggagacaaaacacgcatggaggaactctccggagaagaaaacgccttcatccgcccttccccctccggcggctctttgggaggcgtagcccggaaaacgcgtgaaaccatgattgcatgcgaagccgcgggctttgacattattctcattgaaaccgtgggggtcggccagtcggaaactacggtgcgctccatggtggacattttcatgctcctgctcatcaccggcgccggagacgatctccagggcatcaagcggggcatcatggaactggcggatattctggtagttaccaaggatgacggcgacaaccgccagcgcgccgcagcccactgccaggaactgaaaatggtactccactacctgcaaagccccactcccggctggacgccctccgtcctcacctgctcctccctggaaggacgcggcctggacaccattgaagaaacgctcttccgcttccgggacagcatgaaggaatccggattctggtacagccgccgccggagccagtccctttcatgggtccagtccctggtgcatgaagcgctgctcaccgcttttgaacagcaccccgccgtagcgtcccgcatgcccattctggaaaacatggtggcgggggacaaaatggaccccgtttccgccgcacatgacctgctgagccacttcacttatcccgcgcccggacattaaagaaatcttccagcaccctggcgtaaactttctttttaaactccggcagccactccagcttaaattcggctggggctatccacttgtagtcgcaaaactcccggtcatccaggacgggttccgtagcgtccgcatgcagccggcacaggaagtactcctgctcctgcccaacaaaaggctgccgccgcttttcacggacatactccagcacctccggcggataatcgtaacgataccccctccgggattccacaatatcatactgggacggtaaaaaccccacttcctctccaatctcgcgccgcacggcttccaaagccgtttcccccggatcaattcctccctggggaaactgccaggcccctttctgcccggaacgctcgcaaatcaacaatttcccgtcctgccgaaccatcatccccgcaacattcggacgatacaatctttccatgccctgttcattaacataaccttttccgcatttccagccatgttctttccataaccccgttgaaaacgggcaaaaaatccttttacagatttttcccctctacttcaaggcactccgaataccaacccctttccaccagaagaataagcggtataaaaaaacgaaaaacttcccgtttgctacgggaattccggccaatcagctaaaaactttagtaatcagatattaacatactgccatttttcgaacattgttctttattggcaagtctattgttcctgcaaagtaaaatatgggaaccggccttccttttacttttcacgcgttccgttaataaaactccgatcatgaaaacaaaaatgaactatttgacagccacgcttctggcaatatttgcatggggcggtacaggcgtcggtatggcaaaacaatccaaaaaggtgctaaggcatcccgttgaagacaacaaaaaatctcccggagtttacgatgcgaatcaaaatgaccgtcaaggcattcaagatgcggaacaaggccccggggacaaaccgggtacgtggagcatttcccgtcccaatgttaaaaactcgctgtccgaagtcacaaaaggaatttaccagattcacggcggaggttttccgaacataactattattgaaggacgggaaggcatcatgatcattgcccctttcgtcccgaaagaaaccatggccgagagtcttgacctctactaccggaaggcgggaaaacggccaatcaaggctgttgtagatgcacatccacataccaactattttgccagtaccaaaagaacggcatccgggctggacatagacggcatagaaatggaattcatggcggttcccggaatgggagcctcttctgccgcactgatgtattttccccaattcaaggcgcttttttatggagaggacacggcaagcgccatacatgatatctgcactctgggagtatcaaaaataagggacgcaaaaaacaggtggaaagcccttgatcaagccattcagcgttatgaagacaaaatagagattttattctcacaacaccattggcccagaataggaaaagaaaatatcaaacggttcctggccagggaatgccgcaactgcaaatacatgcatgaccggatattgaacctggttagcaaagggtattcccccgcagaaattgagggaataatcaatccgattccggaaagcggcagaatcaggaatagccctccggaaatcaccgggcaaaaggactatcgtcaagacgccgggacattaaggcacgttatgtctgcccatctaaaaagaggaaacataaggaatctggtaagaaatatgttgaaacaattcggttatcaaacggaatccgtattccggaacgatgaacttctcgtcaatgccggagaaccgggaatcgggctgcttaaaaactcccgcgaactcacgttgacggacactttatatgccctgactccggaactgctgttcgactatttgggcgtcagcctgaataatgagaaatccaaagggaaaaaactggctttcaactggattgcccaaaacggaagatcatacggcttctggattgaaaacgaagtgctgatgtaccgcgaaggaaaactggtcaaacatcccgacgcagtcatcaccggagacaggctccacttcgccctggtcgccatgcgggcaatgcccttaaagacagctctggacaaaggcatgattaaaattgaaggcaatacggataaattcagggaattgctcggatgcatggataagttccatggaaatttccatgccataacaccctgattccattacctgtttacgtacgtttcaggtttttcatccgtaaacaggagtagtggcattttttatcaacatcatgaactgtgccagtaaatattattcaaacagtcatgtattccggcgcaagggagcaactgaaaaaggggacgacatttatcgatggacagacatgttctcccccgcaaacattcaacgatttttccttcccatacagtaagagctgatattaaatagaaagcatgaaacgattcttcctttctgttttagctctatttgtttgtgcagccgcacctctttccgcccagtccaagaaaggagccgccgtcccgtccacggatgactacaaccagagccagttctggataggcaattttccggagggacagtatgtggtgcatctcagccggattgtagcggtggcgcagcacaagtatattctggacaatacctgcatggtgtatgaagtaacgctgattaccctgggtaatacgcccaccaagttttattatctggaaacgctgggtcaaaattccggtatcaacgccatcaggaatgtgactgaccgtgcgaaggagcttggggacggcgccgtcaaccgggcaacgggaggcagcattgacccggatacaaccgttgcgaaagcttacccgaatacgaataccgtggaattccgtgtagctaccctggaacagctcaataaaatgtatgcttccctgctcaaggcatggcaggacgggaaagggaggacgttcaggccctgacggcttgaatcagtgattagagaacagcgccgggcagtcaaatttcaattcgcgggctgcaagtgcggtttttacgctcatctctcatcactgctaaatgtatttcctctccatcatgtgggccttcaaagggtccgcagagaagaggtgggtgaggccgatcgccagagcgtcggcggcatcggattccggcgtttcccggagttccaaaagagcccgcaccatgaaggcgacctgcgttttttgagcggccccgcgccctacgacggaaagcttcacgcttttgggggaatattccataatacgcagcccggcttccgccgcggcaatgaccacggccgccttggccgcccccatcgtgatggccgtctgatgagactggacatagatgatgcgctccaccgccatttcatccgggttccatttgtcaatgagattgcccaaatgctgcttgatggcaagcaggcagccggactgggacacgctccggggaatggtaagcgttccatagtccagggcgcgcgcgcgccggtaatctccctccaccacggcataacccgtgttgcggatggccgggtctatggcaagaatgcgcatgggatgattttcattccatcagagagaaacatcatgtttcccccttcttagcgcctgcggcgcttgggaactgcgggtttgggcttgcggacggatttgacgggcttgtcttccaacagggcggtgtacgtgtagttgaacccgtccagttttttgcgttcaatgggtttcccgatgaaattttccacagccgcagcaaagtccagctcatccgccgtcatgatcgtgaacgcatccccggaagcttccgcgcgaccggtacggccgatgcggtgcacatagtcttccgcgttttccggaacgcggtaattgatgacgtgggtcacgccgctgatgtcaatgccgcgcgccgccacatccgtagccaccagaatatcgtattttccgctcttgaatcccttaagcgcctccatgcgttccttctggggaatgtcggagtgcatgacggccacttccccgcggtagccatgatgcttgagcatgccgcataccgcatccgcctccttgcgggtgcgggtgaaaatcatgacggaacggaagtccgtccccttgagcagggccaacagcagttcatcccgctggtccagagctaccggataaaaggcatggctgatggtggcggccacttcacgccgggcgatggtaacttccgcagggtccgtcaggcaccatttggcaaatcccgcgatgaccggaggcatggtggcggagaagaagagggtttgccttccttcccacggacagaggttgacgattttacggacaatgggcaggaaccccatgtccagcattcggtccacttcatccagaaccagggccttgacttcaccgaagcgcatggtgcagcggtagaagtggtccaccagacggccgggggtggccacaacgatgtccgctccttttttcaggtcttccgtctgctttccgtatcccactccgccgtacagcaacgctactttcaatccggtaaattcaccgtattcggcaaaggcttccgccacctggtcggccagttcacgggtgggttccagcaccagtatctgaggtttgccgatgggttgaagtttcgtcagcagagggagggcaaaagcggcggtttttcccgttcccgtctgtgaggccccaatgaggtccctgccttccagaatgacgggaatggcctgctcctgaatgggggtgggatgttcataaccgcatttctccaccgccttcaagacgggttccgataaacctaattctgaaaataacattgatcttgtatgcttgctaaagagtagaacacgattccgcacagcggcgcaggaaccgcggtcaggagatgaacggattggtcagcagttcgttctttacggtggtataaggcccgtgtcctgggaaaatcatggtcgtggcgggctggttgagcactttcttttcaatgccctgtttcagcaggcgcaggttcccccccgggaggtccgtccgcccgatggagccggcaaaaatgacgtcaccagtaaacatgattccttcatccggcaaatcgtaaacaatgctgtccggagaatggccgggcacctggtggagatgccacaacagaccgccccagttcgccgtgtgaatgtccggagtaagtatttcatccaccacaaacggctgaacattgaggggaagcccccaggcgtcgcgggccattttttccagcgtcaggctttcattgtagggctgcccggcatgaatgcggcagtcgaaaatctggcgcatgcggcaggcgtcctccacatggtcaaaatgctggtgggtaatgagaaggtccgtgatgataatatcgggctttttggaatagatccagtccgcgaaaccggacggagcatccacagccacgtaagtgttatccctcgttttgaagaggtaaccattacaggaagccactccacccgtataaacgcgaatccgatccatgggcagggattgtagtgagatcgcccggaatatccagtataaagacagctcccttaaattgctttctgtcatcttcccctggaaaagcccctcacatcactctccagggaatggtgcatccggcatccatcggcaccactttctgtccatgcccttcataagcgtctggcaccagcatttcacgccgctgcagacggaccgtcctggcaggcggattcaacccgtacaaagcgcaggcatgactggaaacgaagccctgcaaccggtccagggctccgtgttcgtcaaacagggccgccagacgaggaagggcgatgggggcggtaaatacgccggcggcgcatccgcacgcttccttggcatggatgggatggggggcggagtcactgccgaacatgagacggggatgcccggaaagggcagcctgcaacagggcttcccggtcttccggccttttggcgatcggcttgcagaacagatgcggcctcagcatgcctccggccacatcgtctaaagtaatgagaagatgctggagggttaccgtggcggccaggttttcaaattcgtccagcagctgcacggcggcggccgtggtaatatgttccatgcagatagtaagccgggggaagcgcgtggccaaatcacggtaaacatccaggaattcggcctcccggtccatcacgaagccgtggctttcgccatgcaccagcaaaggaatatccatttcctgcatgatggacagggtagcttccgcatccttcatggccttcactccgccctcgctgttcgtggtggcccctgccgggtacagcttgatgccgaacaccagttccttgagccgggacaattccttctcggaataggaacggaaaaatgccgtcatgtacggctggaacacatcgtctccgcaagcgtccagcacccgctgccggtaagcctgtaccgcatccgcatcagccaccggaggcaccaggttgggcatgatgaccgctccggcaaaagaggcggaacttaacggggcgaccagcttcagcatatcgccgtccctcaggtgaagatgcatgtccagcggggagtgcagttccagaatcatgctgacatcatgagggaaaattgctcctaaatcaagcacgctcccccgccctgcaggaaagcagttctccaacgggaaggaaaaacagtcattttcccgcaaaccggaagggacgcggtacatttcgcgctgttgagataaagtcaaattccggaaaacgcatcgtcagcggagtaaaaagcaaattccacccccatgcctcagaagcaggggccatcccggacgattttcctgaaacagcaagcggaatacgggaacagcagcaatccgggcacaaaaaagccgcttggaggcggctgtttcttctgaacaaggtggcgaagcggacggggctcgaacccgcgacctccagcgtgacaggctggcgctctaaccgaactgagctaccgctccataaccttggatgccgtccctgcctgatggcggggacgtggaagcttatacacgcctttataccccggtgacaagaaaaaaagactttttttgcaacttctgcaaccgccggcggtttgtacggtgaagaaaccgtaacttttcagttacccgatttatttcaatacagcaataacttctcaactttatttgttttagtttgacaacaattaaccggttttgacataacaccctcatgcttcagactgccgcggatatcacagcctccgttcacaaattcgagacgatcctccaccagttcaaaagggataacctgaatgaggtggatcagagccattaccagaaaatcatggggctttccgtccggcagatgaacgccctgggtgccctgaaccacctgatgaccaaccgccaagaaggcattcccctgaaagagcttgcctattatctccgcatgagcattccctccacctccctgctggtggacagcatggtgaagaaaggcctgttcgaccgcaaggagaatccccgcgacaggcgttccctgtgcatccgcctttccgaggaaggcgaatccaggttccaaatgcttttcaacggcatgaaggaaaaactggataccctgttcaacactctgtcgcaagaggacaaggagaatttctgccgtattgtggataccctttacaatcacgtttacagtaaataataccatatgaaaaaacacacgcatcatcggaaggcgcccctccgtctgctggccggctccggcctgcttttttccctgtttgttccgggttattcccagggaacgccgggaggggttgcagccaaacccagtaccgtactcgtccagaaagccgccgctattgacagtgcggtgaacaagaagtacatcggccaggtggaagccattgaccgggtgactgtgcagccccgcgtctccggcaacatcgtagccacccgtttccgggaaggaaaagtcgtgaagaagggggatctcctgttcgaaattgaggatacgcgctacagggcggctgtggaggaagcgatagccaaaaaggcccagcttgaagccaaactgctttacgcaaaaaacagttttgaacgctataacaggctgctggcctccaaatccgtctccatggacacggtggaaaacgccaagagcaccatgcatgccctggaagcggaaatccagtccgcaaacgccgccattacggtagcgaaggacgatcttaactataccaggctcacggcacccatcacgggccgcacaggccgcgtcactttttccacgggcaattacattacccccacctccggttccctggtgaccattacaggcatcgatgaagtgtacgtgaagttccctatcagtgaacgcgatttcctttccctgttcggcacccaggaaaatatgaagaaagacgctcttgtgtccgtcaacctcgccaacggcaaggcatacgaccagccgggcaggattttcatgacggacaataccgtccagacgaccacggacaccctgaacgtctgggcaaaattccccaatccggaagacgtgctgacgcccggcggcgtagtcacggttaatctttccaagaaaaatgtggaccgcttcccggcggccaacatttcctccgtgatgcacgatgcctacaagagctacgtttacatcgtcaacgaccagggcgtcgtggaacgtcgggacgttacgctgggcaacacggtcaataatgaacagtgtttcagttccggcgtcaaggaaggggaagtcgtcatcatcgacggcatgcacaaggtgcgtcccggcgccaaggtgaatccggtatattccgttcaaaactgagctacccatgattgcggacctgtttatcaaacgccccaaattcgccatcgtcatcgctatcctgatgatgctggcgggcggcatctgcctgaaccagctccccattgcggagtatccggaaatcgcgcccaccagcatcaacgtgcaggctacctatacgggcgccagcgcccaggtggtgatggaaacgctggcttcccccattgaggaagaactcaacgggttggaaaacctgctctatttctcctccaaatcggataacaccggcgggtattccctgtccctgacgttcaagagcggtacgaattcggacatcaacatggtgaacgttcagaacgccttgaaacgggtggaatacaaacttcccaaggaggtgacagaccagggcatcaagatcaggaaacgctcctctgacatcctgggattcttcgccttccggtccaccagcatgagttccctggagctgaacaacttcgtcaagaccagggtgaaggatgaggtcgcccgcgtaccgggaatctctgccgtcaacctgatgccggaaaagaattacagcatgcgcatctggctggacgccctgcgcatgtccgccctgaatatcacgccggatgacgtttccaacgccatcaaggcgcagaacgttcaggccgcggccggctccatcggctcggaaggggaaaacaacttcatccaatataaggtaaacgtcaccggacgactgcagaccgtggaggaattcagcaagattatcgtccgcacgggccaggacggccacgttacccggctggatgacattgcccgcattgagctgggcgcggaaacctacacgggcagcagccgcaacaacggggaagactccgtgaacatggcagtgtaccgcctggatgacgccaatgccctggaagccatgaacggcgtgaaagacacgctggagaagctggaaaaacgttttccggaaggtgtgagctacgtcgtgagctacgaccccacgcaatacatttccgccaccatggcggaaatcgtggaaacgcttgtcatcgccctgattctggtggtgggcatcacgtacctgttcctgcaggactggcgcgccacgctcattccggcgctcgccattcccgtctccctgatagggaccttcgccatcctgctgcccctgggcttttccatcaatgtgctgaccatgttcggccttattctggtaatcgggtccctggtggacgacggcatcatcgtggtggaaaatacgatgcgcattctggagacggaggatctctcgccagaagaagccaccaagaagagcatgcaccagattacaggtgccatcatcgccaccacgctggtgacggtagccatttacgtgcccatcgccttcttcggcggcatggtggggaacatttacatgcaattctccgtaaccatgtgcgtggccctctgcctttccgcaatcaattccctgacgctcagccccgcgctgtgcgttctgctgctgaaaaggaagcaaaagaaacagagcaggttcagcctcttccgccccttcaacgcctctctggaatgggcgcgcaaaagctatatcaaatgcgccggcatcatggtgcgccgcgcgtggcttacgctgattctgctggccgctgtcctggtcggcaactggaaactgtttgagaccgtacccaaatccttcctcccgccggaagacaagggcaccgttttctgtgatatccagctggccccgggcgccacgctgggccgtacggaacaggccatgcgcagtgcggaacagaagctgatgagcatccccggcgtgcgccaggtttcctccacttccggattcagcttcatgggcggcaacggagaaaacctgggcatgtgcatcgcccagcttgacccctgggacaaacgcaagacgccggaactctccctggattccatcatgcagaaagcttccgttctgtgtgatgaaattccggcggccaaggccaccgtgttcagcccgcccgccatcatggggctgggcctgacgggcggcgtctccttcatgctccaggccagcggggaggaaactcccaaagacctggaacgagtgaccaacgacctgctggacaaaatcaacaaactgccgggaaccatgtacgcccgcagcgcgtatgaggcgaacaccccccagcttttcctgaacatcgaccgtgaaaaggctcagagcatgcacgtgcccgtcagccgcatcttcacgacgcttcaaagcaagctggcctccatgtacatcaatgatttcaacctgatcggctacacgttcaaggtgaagatgcagtctgcggcagaggaccgcaccaccatcaatgacatcatgaacacctacattcagaacgatcagggccagatggtgccgctcagctccgtagccaccctgtcttacatggtggggccgcggcaaatatcccgtttcaaccagctcatgtccgcggaagtgaccgcccaggcaaaacccggcgtcagcagcggcgagctgatgaaccagattgaggctattccgctgccggaaaattactccatcacctggacggacatgagctatcaggaacggcagaacgatgggaaaatcgtcctgctgatggggatggccctgctcttcggctacctgttcctggtggcgcaatatgaaagctggacggtccccatttccgtcattgtttccgtctccgtggccctgctgggcgctttgctcggcctgattatctgcaacacgcccctgagcatttacgctcagctcggcctggtgatgctggtaggcctggccgggaaaaacgccattctgatggtggaattctccaagatggagcgggagcgcggcgttcccatccatgaagccgccctggaaggggcccggcagcgcttccgcgccgtgatgatgacggccatttctttcatcatcggggtattccccatggtcatcgcctccggagcgggagcggcaagccgcaaagccattggcatctccaccttctacggcatgatcctcgctacagtggtgggcattctgttcattccggccctgtacgccatgttccagcgttaccgcgaatgggtgaaaggcctgtttgccggaaaggcggaataaatgtaaaggaaaactgctccatgaaggacggggcggccctggccgctccgctcttttttatgcttcagcgcctccagcggagttacggacaagagcggctatttgacctgctcgtacaaatacaggtcaaaatcttcaaaccgttccttcaggacagcacgctccagccggttctcaaacggaggaagaaaagtgtccgccggatattccccctttactttggaaacccacatgcgggacatggacggcatcatcagggaaaaaatctccgcccctccgataaccatgatttccggctccatcaattccagacattccaactcccctgcggaatgaatcacctgaacgccttccgccgtccacgccgggtcacgggtcagcacgatgttctgcctgccgggaagaggcctgcctatgctctcatacgttttccggcccatcagcacggggtgccccgtcgtaatgcgcttgaacgtcttgaggtcgtccggcaaatgccaggggagcgccccccggtaaccaatgccgcggtcgggggccatggcgaccactcctgtataagtaatgggttgtgacatgatggattaaggaatgaatgcgctaaacggatatgggagccttgatgtgcggcaggggatcataccccacgagctcaaaatcctcataatggaatccgtcaatggtttttacctccgggttgagcttcatgaccggaagaggacggggcgtgcgggagagttgttccctcgcctggtccagatggttccggtacaggtgcagatccccgaacgtatggatgaattcccgggcttcatacccgcatacctgggcggtcataagcagcagcagcgcataggaagctatattgaagggaacccccagaaaaagatccgcgctgcgctggtaaagctggagggaaaggccgtgcttttcttctcccggctgggcgggaatcacgcaaaactggaacagggaatggcacggagggagggccatgtcatccaccagggccacattccacgcactgacgatgtgcctccgggaccagggattatgtttcaggccgtcaatcagtctggcaatctggtcaatgggttttccgtcgtttcccggccagcagcgccactgcgcgccgtacacgggccccagatccccgttttcgtcggcccattcatcccagatgctgacgccgttgtctttcaaaaacctgatattggtctcccctttcaggaaccagagcagctcataaatgatggagcgcaaatgaagcttcttggtcgtcaggcacggaaaaccgtcgcgcaggtcatacctgctctgccgcccgaacacgccgatggtgcccgttccggtacggtcctcccgcccaaccccattggtcaaaacatcctccaaaagtgccaaatactgcttcattcccttaaattacgcttttctaatccctagacccgtgataatacgagcatgcgccaccttagtatcatctcctgctccaaaagccagccttttcacttctccccgccgttttcatcccccgcatcttttccggttttccgttccatgatcattcctgaagagccatatttgggatttgccgccttttgccacattgcaggcgccttctgcctgattccggccctgctccatacgcgtacgcctcagggaacaatcgcgtggctcatttccctgctggcatttccatatattgccgtccccttttacctgatcctgggacgccggagattcagcggatatgtggaaacgcgccgccgccagacggaccccgaatccgcatggggggaactgacggataaaattacaaactgcatggttccgtatgccgtacagtcatcagacacggcgggaaaaatcatgcgcacgctttccaatatcgtgcggctgcccgtctgccgcggcaattcctgccgcctgcttattgacgcggccaatgctttcccgcgcatctacgacgccatcaagaacgcggagcattacatcctgattgaattcttcatcatcaaaaacgactccgtggggcagaacctgaaggagctgctgattgaacgggccagggccggcatccgcatttacatgctgtatgatgaaataggctcccacaagctcccccccggttacatttccgccctgcggaaagcaggagtgaacattgaacctttcaacgggaagcgccatttcctgagcaacatcctgcggctgaacttccgcaaccaccggaaactggtggtggtggacggctccaccgccttcatcggaggcatgaatataggcagggaatacctgggcaagggcgctctgggctactggcgcgacacgtttgttcagcttgaagggccttccgtccagcaaacgcaaatcagctttctggaagactggaactgggccatgctgaaatgcggcccctcctcccttccccgcctccgctgggaaatcacgccccagccggaagatgaaaccctgctcatcctgccctccggtcccgcagacgtcattcccgcctggaaaaccgcgctcatcgctctggcaaacagcgccacccgccggctctggatcgccacgccctacttcgtcccggacgagggggtcatggccgccctgcaggcggcggctctgcggaatgtggacgtgcgcatcctgcgcccggagcgggcagaccatattctggtgaaactgtcttcctttaccttccttcgggacctggacacatacggcatccagctctgggcctatcaaaaggggttcctgcatcagaaagtggttctgatggacgatgacatagccaccgtgggaaccgccaatctggacaaccgttccctggccctgaactttgaaatcaccgccgttatccattccccctccgcctgcgcggaggtaaaagccatgctggagcaggatttttcctcctccaagagggaatccctggcggattacaacaacaaatccctgggcttcaaaatgctctgcaacctggcgcgactgacggcccccgtccagtagttcttccggggaatccgctgttgtatgcttgacctgcaagggaggctgtgagaaaatcaccctccagaagccacctcttcaatttttaacaacagttaactaaataatgaattctgttacattcaactgcaccgttctgcgcgacgggcatcaatccctggcggcaacacgcatgaagacggcagacatgctgcccatcgcccccattctggactccatgggcttcagcgccctggaaacctggggcggcgccaccatcgacgccgggctgcgcttcttgaaagaatggcctttcgaccggctggacgccctgaaaaaagcggcccccaagacgccgcacatgatgctgctgcgcggccagaatatcgtgggctacaccaactatgcggacgacgtggtggaagcctttgtcgccatgagcgccaagcacggcatgaacatcttccgcattttcgactgcgtgaacgacccgcgcaacatggaaacctccatccgcgccgccaagaaagccggagcgcaggcccacggcaccatctgctacacgacttctcccgtgcacaccacgcagacttttgtggacatggggcgggaactcgcggatatgggagcggacgccatcgtcatcaaggatatggccggcctcattcctccgtatgtcacccaggaactcgtcagcgccctgaaaaaggacctgaacatccccgtctggatccacacgcatgacaccgccggcctcggcgcatccacttacctcagcgccattgatgccggagtggacgcgtgcgatgtctccatctcccccttcgccaacggcacgggccagccggactgcctgcgcatgcttgccctgctgaacggcaatccccgcaagccggattacgacgcggacaagctcattgaaatctccgaaatgctcaaacccgtctatgaaagtctgggcaaattcgcctcccaccgcaacgaagtggtggactctgacacgctccgctaccaggtgcccggcggcatgctttccaacttccgcacccagctcaaggaacagggcatggaagacaaatttgaggaagtattcgcggaaatcccggtagtccgcaaggccctgggctggattccgctggtgacccccacctcccagatcgtaggcgtgcaggcgatgctgaacgtcaagttcggccgctggaagaacatcaccccccaggcggcggacattgccctgggctactacggccgcacctcggctcccgtggacccggaagtgcagaaactctgtgcggaaaagatgggcaaggaaccaatcacctgccgcccggcggacctgatcaagcccggcatggaagacctgcgcaggaaacttgcggaaaaggggctccccacggacgacgaacactgcgtcatctacgccatgttcccgcagcaggtggaagacttctacaaaaagccggaacctaaggaagaagcccccgtgcaggtgaacaccgctcccgccgccggctccggcggccgcgccgtccatgaccgtcattgacaacggaatcaccgcccgggtgagcggcccctccggttcccgtgacctgaccatcatcatcaacggccagtcccactccgtgaaagtggaacgcatcggctaaaatctccgaagcatctgctcaaaccgtttgcgggcggttccctccatgaaagggaccgcccgcttttccatttacggattcctgaaaatccatccgccgcggcgctaacctacttggtaaaaaccagcatctttccagccaatttccggctgaggtcagttgccggaattttcttgacggaaccgggcttgagctgatggatttcccccagggaatcaaccgccgttgcgctctgttccgagtcacaggaataatactccaggtcagtactgtccttgtctttgccccaccaggaagcgccaacatccttaatggcgctgttgctgtttttaagagcagccagggaaaattctctcatcctgtccccccaatgaagggcagtcacttcatcgggtttagtcttatccagaacatcctgtaaaacgcaccaatgggcgtgaattccagaattatcggggtagccttcagcattgacacagaaaggcaccatgcagaggcctccgccattcagcgtttcaatgatggctgcgacgtcacaggcaacagactgacacgtgattttggacgggtcaagcgccttgatataatcggccatgcttgaagtagcgtcatataattctccaataacggttttcccgtcctttttgaacttgttcctcagggattccctggtcttgtccccgtccgccgtggcggggattttaatatcataaagatattccaggacaaaggacaaggcgtagagaccgcaagtcggcccccgctggtccttgaattcgacgttccggccttccggattggtaattgtaatagacataattcaataatgatggcgtggggattcatttcccgcacgccgtcattacatcgtgaaagcacagtagacgcacgttccaccatgcttcctgccatgttcaccttccgaaacgccgcatttatcccgcggaaagaaagtgttccggaagctcaactttcccttaatccctcctgcctcatcagggcgaattcccgcctggtggtgcgccttacgcgccagagcagcagcaccgccgctacggacaggccgatgatgaatcccgtccagatgccgcgcgctcccatagccgggacaatccagtccgtacgggcgaggatgtagcacgccggaaatcctaccatccaataagagaaaaacgtaatgaaggtaatggacgccgtgtcccggaatcctctcagaaccccgacggaaagcacctgcaaacagtccggaagctggtaggccgccgccagaaccagcaggacggaagccgtgctgacaatcagctccgagtcattgtacaggtgcacaatctgctcgcggaacagggtgatgcctccaaaggtgcacagacagatggtgagcaccagcacataggaagacagaatggcggatctgatgcctgccaggtcattcctgccgtgatggtacgccacgcggatggaagccgccagccctacggagagcgggagcatgaacaccaggcctcccacgttcccggcaatctggtggctcgccacctgcgtctctcccagcggagccagcaccagagccgccgcgcagaagagcatcacctcgcacagctgggaaacgcctatcggcacgcccaaacgaaccaggtgcgtgatgacggaaggcgtaggccgccgccaggaaatgatgtgcctgcggtacggcctgtgcttgggattgaagtaaaccagcaggaacatcagcaggaattcaatgtagaaaatgactgccgtggccgcgccgcaccccgctccgcccatgcggggaaaaccgtacatgccgaagacgaacatgtagttcaggggaatgttgagcagcaggccgcacaatcccacgtacatggcgggacgcgtcatgttggagccttcgttcaggctcttcagggccacgaaccccaggttggcgggaaggccccacataatggcgaacatgtaggcggaagccatccggcacatggcggcgtcatcggaaatccagccgaatacatttctcaacacataaatgaccggcatggaaaccaggctgagcatcaacgccagccacaggccgtggttggtcatgtagcccacgcggctttcatggcttttcccccgcatgttggcaatcacggggccgatgatcatcagcacgccgcaggcgaagagagccacgggcaggtacacggaagaccccagggccacggcggccatgtccgtcacgccggcgcgcccggccacaatagcgtccaccgcccccatgcccacaatggagaggttgaccaccagcaccggaagggccagcggtatcaactttttcatttccttcaaattccacgtcttattcatttttttatttccttccatgcattcctcattcaaaggagccggaacatgccggcaaacaagccggaccggagcggcaggctccaatccggcttcaaatttaagggttaccaaccgtaccgggccttccgccccgtccgggacattcagcggtcaagcaccacgcgggcacattgttcagccacctggcggaacgcggcggaaaccggattttgcccgggatcttccagggccacggggcggccttcgtccccgccgaagcgggtggaaatatccagcggaatcttgccgagcaggggcactcccagtttagccgcttcccgttcgccgcctccttcgccaaagatatggtaaatcttgccgtcagaggggcactggaaataactcatgttttcaattatgcccagaatgggggtttccacccgttcaaagaggccgatcgccttgcgggcgtcaatcagcgccacttcctgcggggtggtcactaccaccacgccgtccagttcggccgtctggacaatggtcagctgaatgtctccggtgccgggaggcaggtccagaatcagaaaatccacatccccccatgccacgttgcgcaggaactgctggacgtagcgtgtcgccagaggaccgcgcaccgctacaggatcggattcattaatcagcagccccatggaaagaagtttcacgccatgggccgttaccgggataaattcgtcattctcattggctccggggcgttccttggtgccgaacatcagggacatggaagggccgtaaatatccaggtccaccagaccgacggaataccccagcttgctcagggccaccgccaggttcgcggaaacggtggatttgcccaccccgcccttgccggaagccacggcaatgacgtgcttggcgccgggaacggaggatttccaggtagagggatcgtcattgattccttttttggcttccggagccttatgctcgatattaacgtcgcagtgcttcacgccgggcaaatgcttcatcacgccgtgaacgccttcaaaaatgtaacggggaatatccgcatttttgctctcaatcaccaaatcaatcgtgacgttgttttcagcgtcaatgtcaatctttttcaccagcccgaaagatacgatatcgcggctgaaccccggaaattttaccgtggtcagcgcagcccgtatcaattccggagtcaattcctgttgtgtcgtcatatctctgaaatattcatggttgcatcaacattccggccccgcgcctccggaatgcagaatgctccgggatatgaaaaaaggggacggcaaaaccgggaagtaaaaatactcccttttttatttttgacaacgcctaattcagacaaaacggctttttgcccgccggatttgcaatgccccggatactaagaaatggcgggacggccgcagccccgctattggtgaaataaaaaacaggagggagggggaaaatttattccccctgctgcttcagggtctcccggatatcctggagagcggcgatgaaatcatccaaaatttccgcaggcaccataatccggtcccggttggagctcaccttttccgtaatacgcaccactttgccgcgcgcattctgtttgagatcaagaaagaacgtcttgcgttccgcaatgattttttctgtacaaataatatcgtcctccacggctgtaatctacctctggttgaatgaggatttcaggataaagcttccccgctggcgggtcaatgttttatttatcccggcagatgcggccgggaagcaaaaaccggaaaaataacggtattttcccggcagggcatccgttctccgggcaaactggcagcaatccagcgttaactgcggcaacgtggttgaccaacatgaatggagaacaggaaagaacacaggagccgtctcaaaaaaggacaccgtcgcccgaacctgttcacgaagctcattgctcctcttcctgttcattttgagccattcaaccgacaggaggaaccttttccgcccttcagcttccggcccgcccctcgcaaaggaacgggaagaaaaaggaaaagccatgaggggcgcccacgtcccctgggaaggagcgccgcacctcagcattccgcacgccatctggcctgctccgtcttgtagagcttgtacgtgacggcgtccgccagggcttccaggctggcctcaataatgttgtaggaaacgcccacggtggtccaggtggcgacgccgtccgaggactcaataagcacgcggacattggagccggtgccgttttcatcctccgcctccggaatgttcgtccgggtgggggaaagcacgcgcaccttgtagtcgatgaggtgcatctgttccaattccggataccagcgcgtcagggcgcggcgcagggccctgtccagcgcatgcacggggccaaagcccccggcggcggtgtgctccacattgccgtggacatccagcttgagggaggcttccaccatcatgtccgggtccatttcatggcgtgaggtcagcaccacagtgcgcaggatgttgaaatacggtttcaaggcattgtccggcatgtgccgcaggaagagcagctccgcgctggccggggcggccacgtaatcataccccagtgcggcatttttcttcacggcggcggaaagcacgtccagaagggggtcccccttttccagttcaaaacccagggtgcgggacagggaaaggatgttgctcctgccgccctgctccgtcatcagcacgcgctgggcgttccccacaagggaggggtcgatgtgctcgtacaaagcggcttccttcatgatcgcgctgacatgcactccgcccttgtgggcgaaagcggcgttccctacgaagggctgccgccggaaaggcgccagattggatacttccgagacaaaggcggcagtggatttgagccgcgtcagggaagcgccgctgaggcaggaaaatcctttcatcttcacctggaggttggggatgacggaacaaagattggcatttccgcaacgctccccgatgccgtttacggtcccctgcacctggatggctccgctgtttaccgcggccaggctgttggcgacggccagttcacagtcattgtgggcgtggatgcccagaagggcatgcggcaggcgttccctgaccgtcctgataatggagctgatttcctccggcatggtgcctccgttggtatcgcacagcgccaggcagtccgctccatgttcccaggctgtccggagcacagccagggcgtattccggctcccgcttgaagccgtcaaaaaagtgttctgcgtcaaaaaaggcttcttccatatttttcttaaggaaggaaatggaattgccgatgatttccagattgcgttcccgggaaatgcccagggccacttccacatggcgggggcaggatttcccaaaaaccgcggccacccgcgcgccgctggatatcagggcggccagcgtgggatccgtctccggagtatgggaaggatggtgcgtgcttccaaaagcggccagctttgcattccttagtccgacacctctcatggcgttgaaaaattccgtttccaccggattggcgccgggccagccgccctcaatgtaatccatgcccagataatccagctggcgggcgatgcggaccttgtccgtcgcgctcaggttgacgtcttcactctgcgcgccgtcccgcaacgtagtatcatagagaaagattttggtggacatccccttgattcatacatgcaaacgggaagccgttcaagaccgggccccggcttttcccctgatgcagacacgaaaagcgcaaggcttgaaggagaaaccggcttccagtagaatggccgccatgagtttactcaggcagtctctttatctccttttcctcttcctttccgtgtcccttccctccccggcggccatttccgcccacccttttctggacagggagcgtcccatccgctggagccggctgactccggacaagctggaaccggatattcaggaagccatgcgccgcacccgggcctccgtagaggaaatcagccgcctccgtccggaggaaatgacgtatgaaaatacattcggagcgctggagaaaagcaatggcctccttacggaaggcatgtgcaaggcctatgtcctgaaaagcctgtgcgacagcggggaacttcgcaaggccatggattccgtggctcctcgcgtgtccgccttcctttcctccgtcacgaaagaccaggccctgtggaaagtcctgaaaaccgcggaggaacgcctgcggcaaacccatctgactcccgaacagaaacggtacatggaactaagcatgcagagcttccgggacaacggcgctgatctgccgccggacaagcgcgcacggcttgaggccattgacagggaactgacgctcgcctcccagcgtttcaacaatttgtacatggacgccaggaaatcctggacctggacggtgcgggacgccgctcttctggaagggatagacggaagcgccctgcaacaggcgcgcaaggagttcctgaggcgccatcccggccagtccgatccgggctggacgtttacgctggattccgcggcttccgcccgggtcatggaaaaagcccgccgggaagaatgccagaaggatttatgggaacaccgccagtctctggctacgggagcatgcgacacggaacccgtcatcagggaaatcctttccctgcgccgtgaaaaggcgcatttgtgcggatataaggaatacccggattacgccctgcgcgagagcatggcggaaaatggggaaaacgccataaagttcgtcaatgagctgctggacaagatcaaggccccctttttccgtgaaatggaaacgctccgcagcctgaaagcccgccttacggggcaggaaaacgcccgactgaatccctgggacgtggcctattacgccaatctccgggcagaagaacatttccggctggaccaggaagaactgcgccgccactttccccttccccacgtgctggacggcctgttttccctggcggagcggctgtacggcatccgcgtgaaggagattccgacgcggcagtccctctccggcatcccggcaggcgaatccgccggagccgtggaagtctggcatccggacgtgcgctttttcacgattgacgacggcaacggcgaccgactgggttctttttacctggatcttttctcccgtagcaataaacgggccggagcgtggatgaacaccctggatacgggcagcccgtccacgccggaaaccccgggcaaaccgcgcctgggcatggtctgcctcaatatccatcccccctcggcaggagacacggtgacactgtcccaccgggaagtcaggactttattccatgagttcggccacttgctgcacctgatgtttaccagggtttccattccttccctggcgggaaccagcgtgccgcgggattttgtggaagtcccctcccaattcatggaaaactggtgctggcggccggacgtgctgaaaagctttgcgcgtcatgaacaaacgggattcccctttccggaggaaatgctgaacgctctggacgcctcccgcggcaatacgcctgccctcgcgctggccgggcagctcctgtacgcaaagatggacctggccgtgcattcggaaccggaacgcttctccgccggctctctcgataatgtggattcctccgtagcgggagatatggattatttcaaagatttcaaaagagccggcaagctgcgcacggcgcgtcacttgttttcctctcctgcgggctatgcctccttttatttctcctaccaatgggcggaagttctggacaaggatatttttgaagcctttgaacgggccggaggaccggacagggaaacggcaggaaaattccggaaaaccattctggaaaaaggctatgcggtcccgcccatgcggcagttcatggatttcatgggaagaaagccgcgcatggacgccatgctccgcaagaggcggctggcatcctgaaataaaggagccccaaaccgcagcagccgcttccaagcggtaccgggacaaatcacatattatacatttgtttaattaaattatcctttcattatgcaaaggttacagatattttgcagaattcagaacacatctttgcgttgactttgtaagaaaaagaagagaaaattctttcgctttgccgcatcttccggcaccagccgcaaccaaccgcattcatttatgtataataagcctttgacgtttgccgcaacaaccctgctcctttgctccccggtgatgatattaacttcctgcgaaggggaaaaggattccgcagcccaggcgccggcgctcgttcccgaagtgcaggtgaccaaactggtcacgaaggatgtccccatcaggcaggaatgggtgggcaccctgcgcggcactgaagatgccgaaatccgttcccaggtcacgggataccttctttccaaggattaccgggacggcgcttatgtaaagaagggccaggtgcttttccagattgatccccgcccgttccaggcaacgctggaccaggcccagggaagattggaacaatatgaagccacgctgaaaaaatacaaactggacgtggaacgctacacgccgctggtgaaaaccggttccgtcagccgcaaacagctggacgacgccctgcagcaggtccaggagacggaagccgccatcgccacggcaaaagcccaggtggatgaagccaagatcaatcttaaattcaccactattacagcccccatttccggcctggccggcctggcaactccttccatcggcaacctgctgacgccctccagccccacgccgctgaccaccatttcctccattgaccccatccgggtggatttctccgtgagcgaacgggacttcctgaactccatagacaataatctgaccaggcagaagcacctcaagtttgacgtgattctggccaacggcacggaatatcccatgcagggcgaccccgtagccattgacaggaatgtggatgcccagaccggcaccatcaacatcgtcggacacattcccaatccgaacctgacgctgcggcccggcatgttcgtccgcgtccgcgccacggtgaaaacgctgaaaaacgcctcactggtgcctccgcgcgccattctgtccgcccagagcgccaaattcatcatttacctggatgacaagaacatcccccacatgcaggtcgtcaatctcggccccgtcgttgacggcatgcaggtaatcaacatcatccccatgccccactccactttcacgaaggacagccccatcgtggtggagggaatcatgcaggcggccaaggtgcaggggcaagcccccgtcaagccgcttccctacaagcccgtggtatcccagcccgtcatgccctccataggggcccagtcctttgaaaaggccaggacgcctgaaggcatgaaggatggagaagcccagccgtccgccaaataacatcccttctccggagacccaccatcttccctttttccccgcgcattttcatgatttaacgccatgtccagcttcttcatcaaacacccgaccattgccatcgtcatctcgatcgtgatgatcctgctcggcggcctgtccctgatggggctgcccattgagcagtatccgaacatcgtcccgcccaccatcaagatgcaggcgacctacccgggcgcgaatgcggagacggtggccaattccgtagcctcccccattgagcagtccatttccggcgtcgtggggatggattacatgacttccaccaacgccaacaacggcatctgctccctgagcatcgtctttgaagtcggtacggaccccaacatggaccagacgctggcctacatgcgctacgggcaggccaccgcccagattcccgcggaagtctcccagatgggcatcaccatcacgcagtccacgggcagcccgctggccgtgatcaacctgtattctccggatgacagcctgaacgccattttcctgagcaactatgcctacgtgagcctggtggaccccgtaaaacgcgttcccggcgtgggcgacgtgcaggtgttcggcgcaggccgctacgccatgcgcatctggctggacaccaccaaaatggccgcccagaacatctccgtgggtgaagtccagtccgccatccaggcgcagaacaccgtgattcccggcggccagatcggcgcggagccggcccctcccggaacggaattcacgtacagtatccagaccaaggggcgccttcagacggctgaggaattcggcaacatcatcatccgtgcggaggggaacaagcttctttacctgaaagacatcgccaaggtggaactgggctcccagacttacaacgtatccagcaaatacaacggcagggattccggcgccatcgccgtgtatgccgctcccggctccaacgccatcaacacggtggacgctctggtcaagctttttgaggaccgctcccgcagcttccccgccggaatggagtacaacctgacgctggacaccacgctggccgtgcgcgcctccattgaggaaatcgagcacacgctggtggaagccctcctgctggtggttctggtggtgttcgtcttcctgcaaggctggcgcgccacgctgattccggccatcgccgttccggtttccatcatcgccaccttcgcgctgttccctctcctgggcttcacgttgaacaccatctgcctcatgggcatggtgctggccatcggcctggtggtggatgacgccatcgtggtggtggaagccgtggaatcccacatggagcgcggccttacgccccgccaggcggccttcgccgccatggaggaagtatccgggcccgtcatcgccatcgccctggtactggcggcggtgttcctgccctccctgctgctgccgggcattacgggcacgctgttccagcagtttgccgtgaccatcgccatttccatgctcatttccgcgttcaacgcgctgacgctctccccggcgctgtccgccattctgctcaaacccaaggacccgtccaagggaggcccgctgaaattcttctaccgcattttcaaccgcagttatgacgccacggccagcggctacaccaaagtgtgccacttcctgacccgcaagctcatcatctccattccgctgctggccctgatcgcctacgcgattgtccccgtagccaagaaaatccccaatggcttcctgccggatgaagaccagggctacctgttcgcggccctgattatgccggaggcccgctccctccagctgaccacggccgccgcggataaggtctccgaactcatccgccagaatccgaacgtgaaagacgtgatcgctatttccggcttcagcctgctgacgggcgtgcagagcacgaacaacgctttcttcttcgtcatgctcaagccctgggaggaacgccccaatccggaccagagcgccctggcggtcactgcccagctgaacgccctgctgaccacgaaaatttccgaaggggtcaccatgtgcttccagcctccggccattgcgggggtaggttccgccaacggcgtcaccttcatgctggaagaccgcgacggcaagggcacggaatacctggcggaacagacggacatctttgtgaaggaagcgaacaagcttccgatattcgacccgaacaacaacggcggcgtgcgcagcgtgatgtccttcgccgtggaacagaaggatgtgcggctggatgaagaaaaatgcgccacgctgggcgtcagcatcagtgaagccaacagcctgctccaggcctacatggggtccctgttcatcaactacatcaccctttacggccagcagtggcaggtgtacatccaggctcagggcagcgaccgcacgggaacggacatgctcaagaacttctacgtgaagaataacacgggcagttccgtccccctctccaccctcgtgaaaatcacggatatcacggggccggaattcctgctgcgccagaacctgtataattcctccaaactcatggtcacgcccgcccggggctactccaactcccaggccatggaggcgctggaaaaaacctttgaagccagcatgccttccgacatgggctacagctacgcggacatgagctatcaggaagaaaaaatccagaacggcatcggcatcgtgcagattttcctgctctcctccgtcttcgttttcctgatcctggcggccctgtatgaacggtggtccctgcccctcagcattttcatgacggtgcccatcgcggcccttggcgcgttcctgggcctgtactggttcgattatgaattaaacctgtacgcacaaatcggcctggtgatgctcatcggcctggcggccaagaatgccattctgatcgtggaattcgccgtcattgaaatggaacgcggcaaaacgctgatggaagccacgctttccgccgccagaatccgcctgcgccccatcctgatgacttccttcgctttcattctgggctgcgttccgctggcgctggcctccggttccggcgcttattcccgcaatatcatcggaatcgtggtcattgccgggatgacgatggcgacggtcgtgggcattttcctgattccgtgctccttctatttcatcatgaaactcttccgcgtccgcgtcgcccgtaagacggtggaaacggaagacccggatgaaatcatcgcccgcaagcatctgttccacgaagcccatgaatcattaaaagggtaaccccctttgcaaccatctgaaaacagactcaacgcatatgcgaagaaacccatacatcacacgcgccatccttctgggaacggcttttgccgcttcctcctgcatgatgggccccgacttcaaaccggtggacatgcccatgcccgcggcattcaggggagcccccgcggcgacggaatccattgcggacctgccctggtggaaagtcttcaaaaacaaggaccttcaggacctcctgacggacacctacaacaataaccgcgacttgaaagccgccatggcgcgcgtggaaaaggcacgccagtacatcaccatcacggaggccccgctcttcccgtgggcggattattccggctccgtcagcaaaggctccaactataccggaggcggcatcgtccagactaccggaaacacactgacgccaggggcgattgacgccggcatttcctgggaactggatatctggggcaagacgcgccggatgacggaagctgcccgcgcagactacctggcttccgaagaaggacagcgcgcgcttatgctttccctgctccgccaggtggcggactcctacctccagctcctccagctggacgaacagcttgccatcgtgcagaaatccgtggaatcctattccgaaagcctgcgcctgtttgacgaacagctcgaaggccaggtgggcgacaggctccaggtggcttccgccaaggcggccctggcttcctcccaggcccagattcccgccattcaggtgcaaatcgccaatctggaaaatgcggtctccgtcctggccggacgcgctcccggccatatccgccgttccggcagcacccgggacatcgcctataacgttaaggttcccgccggcattccggcctacatcctttccagaaggcccgatgtccgccagagcgaatacaagctgcgcgccgccaatgccgaggtgggcgtagccattgccaactacttcccgaccatctccctgacggcggcgggcggcctcgcctccgcagacctgcgccacgtgcaggggcgccgcggcggctggggcctggggaccaatctgaccggccccctcttccaggcgggcaagctgacggcttccgaaaaagcggccaaggcggaattcctggcggccagcaacgactatgagcaaacggttctcaacgccctggcggaagtctccagcacgctcatccagagggacaagctgcggagcatcaccgccacccagtccgaggccgtggaagcctaccacacggcggtaaaactctcctttgagcgctaccgcacaggcctttccaactacattgaagtcctgtacgcccagcagaacctctaccccgcgcagattcagctttcccagtactattaccagcacgccagcacgctggtttccctgtacacggccctgggcggcggctggaacatgagccacaaggctatcatggatggcccttccgggcgataaaggcgcttcccctgacaacaggcaatatacctgactgttttttctccctccggcaagcacagcttgccggaggatttattttccggcccgggaacaacggaggctctccaaccaccttctccgtcccggcagcaggaaccacgggacggaaattcccaacggaggggctcttttcctgttccgcccccatccggaaagcgccaagccctcaaccactccttctcccttttccccgcggaaacggaggccatgttgaaatttccccaattccccttcattcacgatcaacaggccgcagaacaatttcatcgcgtttttcaggaattcatggtcgttgattccgatatcccgccggtttcaataagacaagccatctcctgctttgacagcttatgcgccaccttttgccggattcaaaatccgtttgcggcatttgattttcccaacaggggtaaagttcggaaaaccatggcggaagaaatgggacgtgaaaagaccagatcccgaaaatactactgaaaatcaacgtattatattcaacaacacacttatcgtcaatatttttaattgtcggcggattttgaatccggtaaaaagcggaagtttcttacgtggaaacatttttagtaattattgcaataacttagatgaagactaaatatcttgctctcctggtcgccgccatgggaagcggcctgtctttcggggcttccatcgacggtctggatgcggcttattcaaaaaacctcaccgcctataacggaactactggagatgtgctaaacgtctcctcacccacaacgcttggtgtaaacgccaacggctcctggacgatggcattcaccatttccgatctgggagtcactccaggttcaaacgtaggattgctgtttacctacaacaccggctcttacaaaaatctggaaggtctgggattccagcttacggaatccggaactctcactctgtgcgccggaggttttgcctacaacggaaatccatctgcttcctcttcctggaaaacgcaaacgttttccgattattccaccagcacccccctgaccctgttttacacattcaacaggggaaatgtttccatctccgccatgctgggggacgacacgtccacgctgaccacgctgagcagcctcagcagcggagccgccttcagcggccagaacatgacccagatcaacttttccgccaaagacgcctctggaaacacatggaccgccccgaatggaatcacgggggaatataccctgaacaattttgatctgtacacggaggttttgacagaagagcagatgacggcatacgccctgagctccgttccggaaccggctgcggcctccctgggcctgctgggcctgggcatccttctgatgcgccgccgcagggcctgactttttccttaccgcgtccattcctgctccgttcagggatggacgttttcttcactctttttcaaatatccttttcatttttccttgacgctctgatgaaagtccggctccctctccccctcctggctgccctggcggcggcattccccgcagcaaccgctgccccggcgggcacggaactgggaaacgtcatgttcgttggggattccatcacccacggggtcaacagcgcctcctaccgttgggccctccataaaatatttacagacaacggcatttcctaccgggcggaaggcgtcaaaaccggcaatgattccgggggagttactgcgggcacttcctacgggggccagatattcaacaatgaacattcctcccaggcaagcgccagggcatgggaaatatccggcaggagcaacggaagcaggtttgacggctccaacattaacaactggctggggctttccggcaccaaggcaaacggaagcgcctattcaggccagacattcaccggagacaatacgccggatacctttttcatgatgatcggcaccaacgatctcctttctgacggaaacaatgccacgctggcgaaccgccttgactccgtttcccaaaacctcctgaacgatatggacaccatcgtggaggccatgttccaggccaatgaacatgcgaatgtcatcatccttaccattccctgctggacccggcactccaacggcaattcggacgccacccaccaggccgtggctgattacaatgatcgtctgaaaacatgggggaatggcaggcagaacgtcacggtcattgacgtcaatgccggcatcattgacgtaacatcctccacgccgttctacggcgtaagctccatgttcaacaaccccggcagcgacggcctccatcccaatgcccagggagatctgcttatggccggcaatatcgccagggccatgggctacgcggggcgcaccgccggacaggaaagaaaagcagctggcggcctggccatcaattttcaccagggcgggcaatcccccgcatggagctcgaacagccagttggaaaataaagggttttccctcgccaatgtcactgtggacgagaacggcatcagcctggggcaatccggggaaagctccatttcctattcctgggcggaagggacggatctgcaaaacggctttacctttgattgcaacctggttctgggaaacggcgcagcagacggatgggataccgcctccgatttcagcatcagcctggggaacagctccttttacggcacgctcaatattaatgaggcctacatcaaatggggcgatgccattctgtattccctggacatgtccgccaatgcggaaaacctgcgtatggcatatatccgcggcaatgagctggaagggctgaaaggcggctattacgtctggctgggggacatgctgattggggaagcgctttccgttacctccggctccggctgcaacggcctcaccattcaatacaacggcagcggaaccgctgttctgcacgacctggccctggacggcacgggttcctatgcccctgccacttccggaacgcttaacgcggaaaagtcttttatttcttccggctccttcacccagagtggaacaccggaaggcaatattgagtggaaaacggagggattcaccaaaaccgctgataatctggccggctccggtacctttaatgcccgcgcccaggcggattcctccgcagggggaacggggaattccgtaaacgtctccattacctccggaaacgccactcatatttatgcgaacagcggcaactacacgggggacgtctggctgaccatctccaaggagggacaggcctccgcctggtacggagctcacggagcttccggcacgctcaacgggaacgtcttcctccgtttcacggatgccgccacaggcggaagcacggtcttcggtgccgtgaacgccgccggcgtcaccggaaacgtttatctggaattctctgcggaaaacgcctccttcggcaccttcaccagcagtaattcctcctctgtggtcggctcctatgccacggatatccaggggaatgtagacattgtggtcaactccggcaccttcaaccatcaaatcatgggcggcatcttcgccaatgccaggatcggaaccaccaccattggaggaaacacgcatgtttacatcaatggcggctccgtcaccggaaatgttatgggcggcggcctgacaggctccatttccggcggcgccaacgtcaccgtcacaggcggcgttatcagcggttccgtttacggcgcgggccagggaggctctatcctggcaggaagctcggtttgcttgacaggaggcctggttaaaggggacgtttacgccggtggcaaggagggttccattcagggggacacgtccgtcaccatcaccggaaacacggccacgctttataacgggagctcctggggcagcatctccggcggcgggtccggcggaacggtggatggaaactccaccgtacgcatccagaatctttcctcaggaacgacggcctacggctttgacaagtacgccggaaacatcagcggcggaaccaatgtaagcggagacaggagcctggtgctggattatgtaaccgtggacagcctccaggcttccctgagtaacttcacccatgtttccgccgtcaaccagacccgcacctcgctggattccctaggcggggcgctcaccgtaaccattgaggcgggaagcagccttatcctgaacggaacctctaacctgaccacgcttattctgggggaacacgcctccctgacgcttcaggggctcaccgcagatgcggtcgtcgtggacatcacgggaacaagcaattacacactctccctgacagagatacctgccagcctggacaacatcaaattcctgaacgacggcgttctgtacgacgcggccatgtccatggatcttcaggccaattccgccatgcttttcgcccaggtgccggaacccggaagcgccgccctggccctggccggactggcccccctcctgtggaggaggcgcagaaaaatgtcccattgaggcccttcgttttcttcaggccctgatggacaaaagaagcccccgccggcgtaacgccggcgggggcttcccatgcggaaaaacggcggagaagaaaaggaaaagcatccatccctccccgggcgtttttcatggaacgggaggagatcaggcccctctgtttttaaacagttccagtgcgagctgagaccaggtctccagtttctcaaacatttccccggacagttcctccggagaaacaaaacggagattggccaaggctgcttcattcgcgcgcacacggtccgtatccagctcaaacaggtggacaatgcccagatgcacggcccccacgtcattggtatcgtcattaatcacgccgagaacccgctgggtgcagttcccgtcaataaccagttcctcgcggatttcgcgctccactccggccagataggtggaaacgtcgtcatggccggattggcggtccaccggattgatatggcctccgatgccgatggagcccttgtcatgcaagcgggcctcgccgccggagcctccgcgcgtgtaatgcagaatgcggccctggtggcagaaaatggcataggcgatgatctgtttgtgggaaggatcattttccgcagcctcccggtccatgaacgaggcgacgcccggcttcatgaacgcattcagataatgatccccgccttcccggtgtccctggaaatagcccgcttcctcaaaggcggcgcggggaaccaccagaacctgttctccatggtaacgtgacatggagacaccctacccgttttcatcccgcgctcaacaaaaaaggcgctgaaacggcaaatttgccccttccttcaggaaggcgcgggctgcccctccgcatcaggagacatccctcacttccacgccatgattccggaacctgcgcatgatgctttccagctgttccgcatccatgagatggagcggcagccacagcaccagcttcttgccgaacaggaacagcagcgcgtggcgcgtcctgcacaacgtggaaaaacggtcgtagggaatattcatgggggcaacgcccttgctggagaacgtcaggtaatcctcatgaaaaacgtaatccttttcctgatggtacatgggcacctttttattggcggccagagcggcctttgccagaaaggggacgtaaaaccaggacaggataatcgccatcagcgccccggccagggacagccaggcgaataagggcagtgggcgcagggaaaaggaatacagcgccatcaatacaaaaaaggccgtaatggccaggtccagcggctttttccacctggggcgcaccgcatggtaccatgccaccagcacctgggttgccaggcggtcggaaggtacgggcttgacgagtttgatgacttctgaatcctgcatcatggcggcagggtatcttcattcccgctgaagaaaaagcctaaaagcaggctcttccgccgccattgtgtcaaaaaagcccctccggaaaggtctcttcccccctttttcccgcctcccattcacgggggaaagcctccttcccctgtatgcaggccagaatttccttgataatcatgcctcccttcatagaatgaaaaaccaaaagccttcagaagacccggtggcagacaatcttcaaattcacgtacgcacgttccagccctcaaccactcaggcacaggctctggaaaccctgacggattccatggcggaagtccttgacgaccgacagctaagacacatcaagaatgcggttcttctgcgtgaggaaacgcagaccacctatctggatcacggcctggccgtcccccacggacgcaccagcgcgctggattccatgcaggtcaccgtaggcatcagcccagagggcgtcctctggccggacgattcccgcaacgctcatctcattgtgatgctgggcgtgcccgccgccatggtgaccggctacctgaccaccatgcagaaattgctgcggtggcataaaaacgcccccctgggccccaatggggaatggacgggagatgaagccagtctcctggcgtcccttcaacaagccctgcaatgacggacaagaaaaaccagcctgcggaaaagacgcgcctttcctggtcatggctgcgcatggcgttgaacctgcgtgaaaaagtcaagctgggggacaagcaggtcatcttcatctgggcggtcgtcgtcggagcgctgggcgccctgatggcccttgtctttgaaatgggtgtggaactggtgcaggacgtcctgacggggcggaccagctacaggcaaattcaggtctttcaggaaatggccggccaggacccggcctggtgcatcttcgttccggcggcgggcggccttttggcggggcttacgcttcttttcacccaccgctttgtgccggccaaggcgacggaatacatggaagccgtggcgctgggcaatggatacgtgcctcccaagcccagccttctgcgttccctgtccgccgttttctccgtaggttccggcgcctccatcggccgtgaaggcccgctggtgcaggccgccgccgtagcgggctccgccctggggcgtttctttcacctctcagctcctcgcttgcgcctggtagtggcctgcgccgccgcctccggcatgtcctccgccttccatacgcccctggcgggcggcctgttcgtaagtgaaatcgttctgggcgcgctgacgattgatttcctggctcccctgctcgtggccagctgcgcgggctattttaccatgggcctgttccatgaacccgcccccatctaccagctccagcaggaagtctctctggcaggcaaccagcatgtgctctggtgcgtgctgctgggggccctggcctccctggtcgccagtttctggctcctcatcctcaaaaaatcgcgccggtacctgaacggcaagcgccaatggctgcccgtgcgcctgacggcggcaggcgtgctggtgggagccatcgccatcttttacccggaaatcgtagggaacggcaaaaatatcatcacctccctcattcattatgaatttgacgccgcgagagccgccgtcctgctgttcctgaaaatattcaccgtcgccatcgtcttcggagtgggaaccgtggggggcgccctgacccccagcctgactatcgggagcgtctgcggcttcctgttcagcgcggctcttacccagctgggggtgcctggggaccatgccatcgcctattccctggtgggcatggccgcctttttcactacagccgcgaacgccccaatcacctccctggtgctggtggtggaattcaccatggccgggcagatgatgttccccctgattatcggagtgctggtttcctacggaatggccaggctcaccaaagcccagtccatgtaccatgattccctggccttcggccccagaagcacctttgacaaacccctggcccaggtacagcttcaggatgtagcgcgcaaggatccgcccgtggtgcatcccctggacaaattcggcaccattgccgccatgctcattaaaaacccggcccagcccatcttcgtcacttccccggccggcaaatacctgggaagcgtggtggcggaagacgtggcggcctttgcccgcaacaaagagctggcccaggccgtactggccatggatgtgctgcgcagcgatatgcctacgcttcctgcggacatgcacctcccggaagccctgggcattttctcccgcccccactgcgcggaatccctggcccttgtgaacccgaacaacgatctgctgctgggcgtggtcaacaagacggacctctacctggtgctctccgagatcatgcgcagggaaaagctgcaataagggctgcctttccgcattaacatccgttgaaatagcggaaaaaaacgccgcttccatcctcggattacgggaaatgtccgttcaaaaccgaacacccggcccgtccaaaggacattttcctttctccgtgtccgcagcaccccgccttcctttcgcgccttatccgggcatggcatcagagagacgacgcattcggggatgtttctccatcccgttcatgaaaaaacgcagggcaaaggcatgctttccccggcacaagcgccctgccgccattgcggaaagtgaatccgacttcttccaaagacctttgcccggagcctctccgtcaaaatttacttcctccggaaaacgcggaagagccggaaagcgtatttttttcctcttcttttttcacaataggggtcaggttaaaaataacaacaaacttgcatttcagaccttttccggtacgcttccggcatgagccgcaccctgagaatagaataccccggagcagtctatcacgtgcagagcgagggcaaccgcggagacgccatttatctggatgacgaagacagggaaatctttctgcggacttttcaggaggcgtcccgcagaagcggatggaccgtgtacgcctacgccctgatggccaatcactaccacattcttttccaaaccgcgcgcgccaatctggtggatggcatgaaatggctccagaccgcttatacccagcgttttaacgcgcgccaccgaatgcgtgggcatctgttcgcgggcagataccacgccatggtggtggaagcggataacgcccactatttttcaactatcattgactacatccacctgaatccggcccggtccggcctggcgcgccgccatacgttcctttccggctgcaaatggacgagcctgcccgcatggctggactctcccgccaaaagacccaaatggattcatccggaacgcggcctcgtctgcttcggctgcgacgacacggaggacggacgccaaaagtacctcaaccatctgatgggccgctttgaagcggaacgcatggatgaacgctccctgctgcccgccggccacgttggccccggcaccgtccaaaggggttggtgctacggctccagcgccttccgtgccaggctggtgggggaacttccccggctggcgcgcagaaagcccgtcacgacggggatgcgcgcatcggagatcggggaataccaggcggaaatcatcgtcaaaaacgggttgaaagcattcggcctgtcggaggaggagctgcttgtcacgccttacagtcacccgtccaagctcatcatcgccctggccgtccggcaaagcacgctggtaccgtatgcctggatcagcaaccggctgcacatgggtattcccaaatccatgggaaccttgctccaccgggcaaaaaaaatggcggaaacggatttgaaaacgagggcgtggatcgagcgcctgagctcctgacctccgttcctcccacggaataatttgaaaaattttcctcccgccacaaggatgcgccgggcatgaaaccgtcatcccgcggcaggaagcactcaaggtcagccccttctccggcacatcatcatgcagaccggcccaagcaatcccacggatgccgcagccggttccggaactactgaaaaagccatggcggcaattccggctttctgccaccaatgcggaaaccaagatggctcccacccagcgttgtttgtaacattccatctctgccgccttgtctgttcctgataattttttcctttgtcatccattctgcatggacaccggattcaaaatccgccttatggaaacaggaacccgaataaccgcatacaaactccatgtccccagcatccgaaacacgcagttctggcaggcgtcaatcagcaagaacggggtcagtttacaaatcacaacatataaacatattttctattttcttactgacccctgaaagccgccagggaaaaaaatgattgccagcccgcttcgcggaatggtaaacggaaagcgcgtgcgaaaaactgcgcgtaaagcgtcaacccaaatacaacaacagaaaagatggcacagacatattcccagcgcgtgctcgacttggttaaggccaagcatagccacgaaaaagaattcatccaggccgttcaggaagtgctcagcacaattgaaccggttttggccgcgaattccaagtatgaagaccacgcgattctggaacggatcgtggaaccggaaagaaccatcctgttccgcgtgccgtggatcgatgaccagggcaaggttcaggtgaaccgcgggtaccgtgtggaattcaacagcgccatcggaccgtacaagggcggcctccgcttccaccccagcgtcaacctcggcatcctgaagttcctgggttttgaacaggttttcaaaaactccctcaccacccttcccatgggcggcggcaagggcggttccgacttcgaccccaagggcaagagcgataatgaagtgatgcgcttctgccagagcttcatgacggagcttcagcgccacatcggcgcggatacggacgttcccgcgggggacatcggcgtgggcggccgcgaaatcggctacctgttcggacaatacaagagaattcgcaacgaattcaccggcgttctcaccggcaagagcctgaactggggcggctccctcatccgtccggaagccaccggctacggttgcgtatactttgcccagaacatgcttgccacccgcaacgacggcctgcagggcaaggtctgcctggtgtccggttccggcaatgtagcccagtacacggtggaaaaacttaacgaactgggcgcgaaagcggtcacgatgtccgactccaacggctatatttacgatccggacggcatttccccggaaaagctggcctgggtcatggaactcaagaacaagcgccgcggacgcattgcggaatacgtgaagcagttcccgaaagcccagtactttgaaggccagcgtccctggagcgttccgtgcgactgcgccttcccctccgccacgcagaatgaaatcaacggggaagacgcccgcaccctcatcaagaacggctgcaccctggtggcggaaggcgccaacatgcctacggatctggaaggcattgaaacctacctggccgccaaaatcctgtacggcccggccaaggccgccaatgccggcggtgtggccacctctggcctggaaatgtcccagaacagccagcgcctctcctggacgcgtgaagaagtggaccacaagctgaagaccatcatggccaacatccacgcaaacgccgtggcccacgcccatgaatacacctccgacaaatccttcaccaactacgtcaccggcgccaacattgccggcttcgtgaaagtggcggattccatgatcgaccagggggtagtctgaccccggcccgacatacttgctgccaatgtaaaacacaccagaagcgccgggttcgcccggctcttctcttttctacggaaatgtctccattccggaagttcctttttcccgtatgggccagacatggcggcggaaggacttcaaaagcctcccggcattggggacaaccaccctcaggactttttcccggctgcagggactttatctgctgcatcacggcagtctccgactattcagactgggcggtcaaaagcgagccagatgacctgcttccggaatttgaagggctattctcttccccctttcccattttcctgcatcaagaaccggaaaaacgcttccccggctccaattcttaaaagatactgttattcctttaacaggcggcagacggcctgggccgcatgttccgccgcccctccctgccccaacttgtcggaggcctgtttcatttccttcagcagggcatccctgttttccggaacaagcagacgttctatttcaccaatcaccttgtccggcgtaaaatcaaactgaatcagctccttcaccacaggtttctgcgccaggatattcaccatgccgatgaagcgtatcctgatgagcatgcgggccatccagtacgtcagcaggggaaccttgtacaccagcatgtacggcagacggtgcaaggcggcttccatcgtggcggtgccggaagccacaactcccacggcggcgcgatccatcagctcatgatattttcccaccgcaatgtggaacagttccggcggcattccggctttccgcaccatgccgcgcattctttccgccagagcctccgtggaagcggcggtttcaaaagacagttccggccgttcccgggaaaggcggttcactacctctataaataccgggaaatgcctgtcaatttcacggttccggctgccgggaaaaaggccgaccagtgacggatcccggacgccctccttacggatggaagcaatttcatctaccagaggatgccccacaaactccgttctcagtccggcttcctggaacaagggagcctcaaaagggaagatgcacatcatcaagtccagcatgcgcaccatcttgggaatgcgcccgcgatgccatgcccacacctgcggggagataaaataaacgattctggtgcgggggcagcacttgcggaccctctccgccagccgcagattgaaccccggataatcaatcaaaacaaggcaatccggctggtcctgccgtatcctttccagaatggagagaaaacgccttctgaaccatccgtattttttgagcacctccaccacgccgataacggcggcttcatccgcccagtcttccacgccgggacataacgcgtgcatgccctggccgcccagccctgcgacctccatgccgggcatcaggcgcagcagattcttcaacagcagggcaccatgaatgtccccgctcttttcgcctgctataatataaagcttcatcactatctgcatcggcgcacgccggacgcctccctaccttaccagccccgttcccgggacgcaataaaagactttcctttcaaggattttaatgcaagatacgcgccgttatgcatgagttgatctcactttggatgtcctgggtgcaggactggggatatgcgggtgtcatcgtcctgatggccatggaaagctccatctttcccgttcccagcgaagtggtcatcccgcccgcggccatcctgtccgcccaggaaggagcatccatgaacttctggggagtggtggctgccggaacgttcggctcctggctgggttctgccattacctacgccgtggcccgaatcgtgggccgcccggtcatcatgcgctggggcaaattctttttcatgccgccccacaaggtggaaaaggcggaaatcttccttcagcggtacgaagtttccggtgtcttcttcgcccgccttctgcccgtcatccgccacctcatttccattcccgccggcattgtccgcatgggattcggcattttctccctggtcaccgtgctcggctcgtttgcctggtgcacggtactcgcctggtacgggcaccgcatcggggaacggcatccggaattgctcaaatctccggaggagctgatccgcaccgtcaagagcgaaagtctcccccttattctggccgtgctggttctggccgtctgttacatactcatgcttcgtctgacggaccgcaacaagccggaaaaagccgcagcggacacgtccgcagaaaaagagcagtaacccccctttttcccatgatcccttccaaggaagaccgggcagcccgggcgctggattatttccaccagggatataattgttcccaatccgtttttgctgcttttgcagatgtctgcggcctgacggaagaaacggccctgaaactgtcctctcccctgggggcaggcattggacgcatgcgggaggtatgcggcgctttttgcggaatgagcatgctggcgggaagcctgtacggaaacagttccccggaaaccggggaaaaggaaaaaatcttttccctagtccaatccctggccgcctccttcaaacaggaattcggcactctttactgccgggaactactggggctgtctccggagagcttggcagcggaaacggcgcgccccggagaaaggactgccgcctattacgcctcccgcccctgtgaacgctgcattgccttctgcgcccgctgcgcggccgagctggaagcaaaagcccggcatcatgaaaatacccggccccctttgcaggggaaccgggcgctttaaccatacgcaaggcgccgtcaatgagaggcggaactgctgcatgcgccgtccgggcaggacgccttcagcttgtctatcttttcattcgtttcccccatcccctcgtcataaaagccctgctcgtccggggccagcacctggaggaggcggagaaattcgcccgcgtgttccttttcctcattggaaatatccagcagaacttcctgggccagcttatggtctatggattctgcaagctgggtataaagctggatagcttcatattccgctgcaatcatgaaccggatggctctcaccaattcgccatgggtgagtttccggttttcctttaatccgctaaatgcatttgtaaattcaggcatgcagatgggacctgatacgtaacccattcattcaatatgctttgtcataaattttatacgatggtggccttaaagcagtccagcgaacaaatttccagcctctcttgccggaacaaaaaaagagcgccggattctcgtccgccgctcctgttaatcaagctcctctccggaacacctgccttacttgccttccgcagtcttgggtgcgtatttcttgaaaaattcaacgtactgggcgggagtacggccgggaacataacccgtgcggcccagctccttgccatccgcatccaccaccaccatggccggcacgccggtaatgttatacgtcttggcttccttggacttgctgaaatccgaactgccgaactcaaatttgacgccaatggccacgccgtccatgccttgtttgaagtcctttttggaaaggatttctttctccagcttaacacaaaagccgcaccaggacgttcccgtgaaaagaagaacaatgggaaggccggtttcctccgcctgcttttgagcgcttttcaggctcttgccccagcggaatttcactttcgccgccttggcagccttggctgcggcttccttgtccgtgggaacgctttgagccatggaaatgccggaaacgctgaaccccagcacagtacacaatgcaaaaataaaatgtctgttcatcatactctgtgaaatgttcctctcagactagcagaaatactttgtataggaagagaaatcggtgtctttttcctagaaggaacgcttccgtcccctgtccccaaaatgaggcgttctcaaaaaaagtattgctctttcctccttaatcgggtaataatccgcccgcacttacaaacgcgcggttagctcagtggtagagcaacaccttgacatggtggaggtcgtaggttcaaatcctataccgcgtaccatttttcttaaaaccccgttcctttccggacggggtttttcattgcctccctccagttaatagacatagcatcttcttttccccgtaacaggctcaattgaaaaatgccggcataaagagacggttaatgcaaaagtttgcgttgataagaaaaatacgggataatcctatctttactcacttacagtgaaagatataatgagtatttaacctcattggtctcccatacagggaaaaatgtttttccaactttttttgaacacaagccccttcccgggacgctaatggtaggagggcagcttaaggccccagcccttaccccctccttccctgatgaaacaatgactattaaaagcccggcggaaagcattccgccgggcttgctttttatgagactccaccggttaaaacgtccgggaaattaacgggtagtcaaacgatcatataactcattggcatatttatgattgggatggttcacattcatatacgcctcataaagaggatgggatggatccgattccatccgcatggcttcctccgcgggggaaggcaccgcatttcctgtatgatggagaggagcttcatcaagcaggcgtgatgcctggtacaacaggcggattgcatccggattggaaccgagtcccggattatccagtaaagcgtccgcatccacccctgtttcagaggcaagccgccgaagaacggcagcagccctgcccatgttgcgttcataattggaaccccattcctgctgaagggactgttccgcctgcatttccatctccatccgggcatcttccatgtgctcgcgggcctcatcatatgcctgggccatcgtctcctgaagagcgttcattgcctccggcggcactccgtaacgataggccgtgcgggccatgcgttctgccaggtcagcattccattcgctttccggcgtggattctggacgttccaggcgatattcttcctccgactccggcaatccggccagccggcggaaccgcgccatctgttcttcattctccacgccgggataacgtcgcaggcgttccagctccgcgtaactcttcgccagagcctccggcgtcttaaacttggaaagagatttctccatccctttcaactcatcaaaccgggcgtaccagtccggagcaaaaccaccgtcctcacccagaaggggaggaaaaggttcagtttgaacttcggtttcggacagtgcgtccgtctccggggaaacgaacccggaaccctccgcatccctgaaaggagcggccatgctgttatcaatggaatcaatcatttttctcttcttctgtggtttctttaatggctaattgaagctggcggcggatgtacagaaagatctccctgtaggcatccctcctcatggcgtccagagggtcgtaattccccggacttccttgaaaaacgggcaaatcagtctggaaacgggtttccagaaaggtaagcgcctcacgcccgtccggggtgtcaaacacccggagaagctggcgccttttgagacgggcctcccggacggaggcctcctgctgcaatgtcgtatcctggttcatttttgaatcgcggttaactggtcaagcaaaggattgagggaagcataaggatcctcttccgccggagccggggaggctccctgccggaggtccgcccgtttcttccgcatggcgcggacatcggcccagggcctcagcatgctctccggggcgccgtccacccgggcggacaggcggaaacagtggtcccagtccacatgatccgccaaatccggggcagcctgtatcatcatattcagccgctgaaggctgcggtccatcccttcactctgcaagcgcctgagcaccagggcaatctttgactgatagacaaccctgggttctcccacggcaacggagccgtccctcccttccctcaatgccgcacgggggggcctgggaaacttgcccatacggaacagcagggaaaaaatgcgtgtcattgtggaatacagatcactcacaaacagtgtgaaggaaggagaaaacatcaagacgcgctcattctcccgcgccatgacctccgtggcggtcatattgccgcggtgcccgctccaaagttccagcatgggcagataataggcgcggcgtatcgcatcctgcttctgtgccagacggtccatcccgacatcatacctgccctgcgtagcccattcccggggaaggtgaagggaagcagcctccggggtaatgacggtcctgccgccggcccgcaaatccacctccccaatctgattggcaagctccagaatacggggaaaggcggccacctcgccaagagtgtccagaatacggttcaggaactgcacctgctggatggcgggaaacaccagcctgccgggagccagaccgtacgggccgctgccccacttcaaaaagcgggttaccagataagggaactccatgtatcccccttcctccacgatcacctggtcgtccagagacaggtaaacgctttcaaacggcatgtgggaggcctgctccctgcggcggctgcgccgggtgcgcgggcgcaccacatgcagaaacctcagagttgtggcatacggattgcctccgcgctccagaacttcccgagccttgggccccagagctttcaccccgaacatggagcgtgcctgatgagccgtgtaggcaaactccctgacgtaggtatctacccggccttccgcattctccgcacaggcgaactgcccgcacggaatattggtgaacaacagccttccgtccgaggatgtgcccgtaaacaggcttccggtccccaaagccacccggtccagaaaacactcatggatctccgtataaaaattggaaacggacaattctttcagggcaatttccgaacactggttataccaggcctccgcctcgtcgcctccccggtcgtccggagccgaccacttgaaccatacgtcatggctgggcgtaatataggacatatggccgctggccagcttctggcatgcctccacagccgtagtatccgtcatgcggtccatggcgtccctgttgggtagcgaaacctccccttcccgattcaggcggcgaggcagcacgtaatcccttagacggtcccaccacgtctcccatggcgcgcgctgggcggccagggacttgtacacggaattcaattccgcaactctttcttccatggcagcgcctatcccagagttttcctaagcagagtccgcggattgacctccccctgcccggcggaagaatgacggcgcgccagaatggtggaaatcattccctgcctctgccgttcccgggcctgataatcttcccctacttcttgttccacgctctccgccttgaccgggatggtctgctccggagcagaagcggaaggtgtggacggtttcataaatcccataatttcttttgctttctattcatggttgatactgattctccttcccttctgccggatataaggctccagaggatgccggacgcccgcctcacagacaatccatgcggcgggagcgttcttttcccatggaaggaaagggagctctctccacctgcccggacaatccgggcaagtgcttgcatttatcaaataaacaaatcggcaaaaaatgcacctgaggaaaaaccggacgcatacatgccattggtggcatcaaagaggtcgcctccaaacgtgatgcattccgcatccgtttcctccaaaacatagggcgctatgatcaatgaatccttacttcagccggatacgccatccgcgctggacatctgcaacgcggccctctccaaaataggggaggcacctctggacgcgctgattgccaatgaatccacggcatcccgcctttgcgttcttcattaccatccggcccgcagggaaaccctttgcatggcgcgctggaccttcgccgccacgcaaaccactctggactccgtttccgcacaggcgcccaattccctgaccccctatcaattcacgctgcccgcagactgcctgcgcgtgctggatgtggaatgctcggaatggaaaatgcagggacgccgcattcatgcttcctgcgccccgctgcccctaagctacattgccgatattgaaaacgccgaccaattcgatcccctcttcatggacgcactggccacccggctggcagaaaaactggccatgcccctgacgggcaaccaaagcctgcgccagaatcttaaccaggaattccataaaatcattcttccgcaggcggctaccgtcaatgcggtgcagtgcttttccaatgattcccacccgctgctggatttgctgagaaaaatcaaatcgccctcttgcccggaagaatgtgaataacatgagaataataagaaaataacataataataagttgtgaatacatgctcatgaaagcactggatttcatacagatatttgcctccaacgtccgcaggctggacttccgcctcagcagtgcccaggtcatcctggccgtcattgccgggtacaggcgccacagcaccattacggaagccacacggctgcaccctaataccgtcaccaatatcctgcaggatctcattgcgcagggatatgtcaaccgtattggagacggtcgcccttatgtttaccggcccactgcggatggagaacagcttgccggaaacctgctggacaaaaatacattccccggcacatgaaaaatcccctgctcagtacggaagaaaaacgtcgctggttggcccgcgttttccgggacgaggacggggaatactctcaggcggacaaattcaaggcgctggtggaagacaccaaactggcagcccttcagcaggaagaggaggaattcaaacgccagcgggaaatgggcgcagcaccacaggaccccatcctggatctgctccagtccctccccccggcagaactcaatctcaataatcacccctcttcctgacaacttaacaagatgatggaacaaaaaaagctctctagaccaaacaagcttggagagctttttcttttccagataagttacgtactccctggagagtacggcgggtggcatcttctcgaagcttgccctcgtcatgtttcagtccacgcactcatgagagtgagcccccctgggcgtctatggcactgattatcaacaatgcaacgggcgttttgcgccaacctcccatgggaggtacaaaaattccacgtcgtaaaaagagatgatagttgtcaagatcagaaccccaacggattacgaaaaccgccggtattccggaaatttcctgtgagcttggggttgggggaaggaagaccgggagaggagcttttcatacgttaaaaagcccgcatctccggcaaccagggcctgtgcacgatgcggaaacatcctaacctgttccctctttcccatccagaattttgtaggcctctccccggaaaccgttttattctgttttccacaaaagaagaggcaccccgggatagccgtggtcccgaagcgccctgcggaaaatatccgcggtttacatgatgcttttgcgcgtccacctgttcaggctcaacagccagaccaacgccgcggagacagcggaggccagacaggccatcaacggaatttttacggcggagggcagccctcccagcccgatgaagttcacgaagtcataggagcactggacaaagaagaagtggcacagatacacgccgaaagtaagcgccgccaccttgctcagcactggaccagccttgattctgagccggctgacgacggcaaagatggcaaaggtcatcagaaatacattgattccggagaaataccagagcacttccagcttggaatactggccggggaagtgcttctgcgtttccagaaagccgaagaacgtaacggcaaaaccaatcaaaaagaagggaatagtaatggacagcgtttttttccagctccaggccagcgggtatttggtcaggtaatgcgccagcaccatgtatcccaggaatccggaaaagttataaaacataccgtacggattccaatcgcaaacacccagaatacccatgttgccgtaattaccctcataacccagtgccggagcaagcatctggatgtaggggagagtcatgctgaatatccagatgcccaggaagattttcacatctttcctcctggcttgcgtcagccacgcgctcatgatgggcatgaagaggtacaggcccaccagcatgtatacataccacaggggcgtggtatcatagttgaagttgaagaagaaggtatacagcttgccgacggtggcgctccaggtataagtgtccatcacgatgttggggctggacgtttgaacgcctgcggcaaagtatccgaagtagagcaagggaagcgccagtgaccagacaatgagcggaaccagcaccctcttgaggcgcctggagtaaaaagcgcccatttccaaggtgacgggaaagagcaacactccggagatcatggcaaacaaaggcacgcacggccgtaccagacttccccagaagacagcggatttaaagttgaaggaaccgtcaaaacttccaacgaacggatcacagcaatgggccaggacaacgaggaagcaggccagaatacgcagaaagtccacccaggcgatgtggctgccacgggagttcaatgattggttggtgttcatggttacgtggaaaaaaagcgccgcgtcatcgcaaacgttcctggtaatatacccgtttcccggaaacgttctatcatcaaatggagaaaagaaacaaaaagcacccaatccctccttcccggcaacaggggaaagctcttcgggaaagcctgcgcttcctgcaggattccacgcatcttcccccataagaatcacggaaccttttcccgcaccgccggaattgttcaccgtgaggcctggtgaaagttttctcattcggcgaagttcatatttcattcaacaggatactcctcttccctccttgcaaagaaaaattttttcccctcctttcagtgaagagctattccgaaacggaaggggaacacacccaacacccatgttttccttttgaaccggcaggaggatttcccttcatttttatggctaagatacccggaagccgggattcaggccttccctacccttcacacgctgtctgttttaaaactgcccggcggcgggatgagattgccgtagcggtgaacggtttcggaaacagcctgttcccggaaataccccagcagttccacccgaccattggcaagcacgggacggtccagcacttccacatcccgagcatgggcggcattgaccagagcctcggaaatatctgttccacgcaggaaccgtacgccttgaagggcttccggcatccggccgatcaattccgcttccgtttccaccgacagggaagcatagtaaccatgcattttctgaatccaggggcggctcgcccctatgctcaggtgcaggagcaccccgcacagtttcgcccccagcagcagaatggcgacgtcatcgtcggacatgttttccacacgggccagaattcccttcaccggggtatagcggaagatattattttctccgtaaacacgggagggatcatgatccacgccgaattcctccatccaccacttggcctgggaaccggccgcggaacggatgcgcttggcgcagtccggcagctcggaacacagtttttccaccagtccggagatacgttcacccggcgtgcgcaacttctggggcagtgccttttcctcccaacttcccagcatggtaaggtagttgggacctccggccttggctccaggccccatggaggaatggttccacccgccgaacggctggcggcggacaatggcgccggtgatgacacggttgatgtacgcgttgcccacctgcactttagttttccacaaggcaatttcccgttcatccagggactgaaggccgccggtaaggccaaattcggagtcgttctggatgtcaatggcttcctccaggttttccgcacggatgattcccaataccggaccgaagcattccgtctgatggaaccagcttcccggtttcacccccagccggatgccgggagaccagaggcacgggttgtcttccgaaggttccggcttgagcagccattcctccccgggttccagctgcgtcagcgcacggagcagattcccttccggctccctgatgagcggcgtcaccacggagttgacttcccaggatccgcctaccttcaggctggcggcggcatccttcaactgacgcaaaaaggcgggattgtcataaacggaagcctccacaatagccacgctggcggcggaacacttctgtccggaatgaccgaaagcgcttttcaccaaatcctttacagcctggtccggatcagccgtagcagtaatgatcatggcatcctttccgctggtctcagccagaacatgcaggtcaggccgcagttcgcgcagcatttttccggtgcggtaggatcccgtcatgatcacgccgttcaaacggggatccatcagaaacttgcgggaaatttcattgcgcggcatcggcacgaattgaaggacgtttttaggcacaccggcacgccagaacgcctggacaatctgccaagccgtataaacggccagttcggacggtttgaacaccacggcatttcccgccatcagggcggcagctacaccgcccgtcggaatggcgaaggggaaattccagggagacatcacgcagatggtacccagcggggacatttccacgccgtcgttcattccgtcgcggtccaggccttccgcataatagcggcagaagtctatggcctcgctcacctctacatcagcctccgtgggagctttcccggcatccctcaccatggcagcaatggcttcccccctgattctggacagctcctgcgctgcccggtgcaggatttcagcgcgttcgccaatgcttttggacgcccaggaggagcgggccctgtccgccgtgaccaaggcatgttcaacctggtcaaaatccgcataagcgaatttataggaaacttcattatggcgggacggatcgcgccccacgccccatagattagtcgtaatttcctcaccatctataaccagagggatttcctcgccggatttttccttctccgcggcaatcagcccgttgatccattccgcattctgccgcagggaccagtccgtatcccgctcgttggcaaaggcgtcccggtaatgtgagggctggatgggatccgcagcgcggttctgcgtgcggttgggaccgtacttcacctcatccttttcctgacaggccttcaaaaacctctttttctggacctcccagctccgggaccccggtgtcatgccgaagagatcatgcaggaagttctcctcactggtattttcatccagtctccggaccaggtaggcaatagcgctgtgaaaatcttccttcaaaaccacaggggcataaaggagcagaccgtccgccgcctggcggataacccgcgcctgatggttcgccatcccttccagcatttcgaattccacctggtcacgcacgccttcccgctcacgcagcagcatggcataacacaaatcaaacaggttgtgggaagccacgccgaactgcacatatctggcattatccggcatgcagccgtaatggagcattctcttgtaattggcatccacctgggctttcgtgccatacggggcctgcgcccagccatgcatggaggcctccaccttctccatcgccaggttggcgcctttcaccaggcgtattttgatgcgcgcccccccctgccccacgcgctccttcgcccaggcgcacagcttcatctgctcctcccaagaatccggcaaataggcctggagcacaatccccgcctccagctgcatgaattcatcctccatcaacgtacgtttgaacgcttccgccgtcagatgaagatcacggtattcctccatatccagattcacgaacttgggctttctggaaccgtccggcaacgttaccgcattggtaatggccgcccggtacaggatgcgcaggcgctcctgaatcaatttgacggtttcttcaaaggctaccagatgaatctggctgaaaatggctgaaatcttgacggaaatatagtcacagtccttgtctgtcagccggtccacgacctgctgaagacggtggtgcgcctcgctttcacccagaatggcctcccctaactggttgatgttcatccggatgtcgcccttgcgcctgcggcgcaggtgggggcgcagttttccatcctcggcaggaagaatgacattggagctctcctttctcaactggctggtaatcacgggaatgaccacacccggaaattgagcggaaaatctcccccccatcttcatggcgaaacggtcggccgcagacaaataacggggaacgccatatccgtccagaagatagcggaacaactccgcgccccgcgccggagaagaaggacggaacacccgatccgccagcgccagcgtaaacgccttgcccgccggatcattcatcatgcgctccatttgctgcgcctgcctcttctctttccctctcatcccggcattcgactgctttaaaatggactccgccagttccacagccttggcggccagttgctggtcagtccattggcctcggcgagcctccgccatcatgtccgggatggatgaatctgtcataacggttcgaagactagccccggacaggggcaaaatcaagccaatttgcccggtccttcctgtggaaagaggaatcacggaagaaaacgcatcccttgattccgtgacggaagcaggggggccttcctgtccatttccggcaactcaggaaagacacatcaatcataccgcgcagccgccagacgggctcttctcagctcttccctgagctggtgcgcccgtctgccgcaaacgctggaacggttcatgtcccggacctcttccaaaaccgcaaccgcctggttgaaggcatcctcgctttccggagtgtgggcttcccggtacagaacctcttccagccgtacccagaggggatgcaccatggagagcagaattaactggcgctcctccacggataacgaggggtcatccgcgcaggcacgccatgcttccaggcatgttcgtatggaagaagctttgctggcccggaaagactcgccaagcaattcggccgttttcctgtttttctccagacgaagggccgcctcccgggcgttcagaaaagccggaaccgtacagttcaatttttccagacgcttcatggtgccaggataatcccggaaccaggcttccggaggcacctgttccagctcccggcaaatggcggaggcttctgccgcagggtccccgcccttcggaatatcattcacccgcgtcaccggccgcacgcgctgcgctttttccgcaagcagggacactttttcccgcagagaagctgcagaggcccctccttccaccaggtcgaacacacgtcctttggagtcaagaaaaaccacggaaggcagcatgcgcacaccatgcatcgccgctcgggacaggctgccgttttcttcccaatccttcacggagggatgtctgggaaccgtgacaaactgcacgtcacgcacatattcatccagcgcgcggcgttcttccgtgcccggctggagcactttcaaccaacgggcttccgctgaaccgggttcctctgaaccgtacacaaccagaacaggggatggaagggagggagccgcagaacaggagacggaaagggcatccatttccgcacgtcccggaaacgccagagccaaaaatgcaatgaccgctaaagtcctcatgaataaactgccatccatcagccctttctgatggtaatgcgcttgtaacggctgtccccttcttcggactccgtcacaattccttccatggactgaagggcattatgcaccaggcggcggtggtaggcattcaacggaggcatcttcatcggttttccactctcctggacgcgttcggccagggaacgggccttttccagcagacgggcttcgttgcgctcccggtaatggtcgcaatccaccttcacgcggggagcatcctccatcttgcgctggatcatgcggttgaccagatactgaaggtcatccagcctgtccccgtcccccccaatgatgtactgtgaatccggggaggaaatattcaggcacacgatgccgtccgtttccgttacttcgatatccgcggaaaaccccagcgaagccagaaggctcttcaaactctgttcagctatttcttgcaccgtcattactttaaattaatagaaaaagggttccataccggaaaaaccgcctcgcgccggacggtgcgagccttttctccaatacccgattgacataaaaatcataacctatttattcccctcgtctatgaaaatttgtggaagctccgttccatatcatgtacgcaatgccgtccctgccctgccgttccggcaacacggttccgttcctccttcggaaccagatgcaggaaacaccgcttaacaaggaggccactgttttccgcctgcccgcggctgtaccccggttatctccgcttcttcctgccgcaaatgaaacacaggctgcaggcatcgcagccatgccaatcaaacaggcatttcctcacagcccgttctttattacataaaatattaatcaccagtttttataaaaatttttcatccgctccggagaaacactgatgacaaaacaggacggaacatccccgggaaaagggaagtcgaactattacccacatagaaaaatccggtccctcatgaataagccaatgaaaaaaaagaaaccgcccatggaagacagcgccgccccttttcccaacggaaaagaagctgctccccattatacggatacaattgatccggaattgatcaaacccactccaaaacctacgccgcccaatgcggaaccttccgcgcccggttccatgaagatgccggataacgctacggaaaaaatcagggagctggatgccatgcgctccaacggcatgggacaggccctcacaagcaacctgggagttaaaatatccgatgatcaaaacacacttaaagcaggaagcagaggcccctctctgcttgaagacttccactttctggagaaaatggctcattttgaccaggagcggataccggaacgcgtggttcacgcaagaggttccggggcacatggttattttcaggtgtacaaatccctttccaagtacaccaaagcggcttttttgcaggatccgggagaaaaaaccccggtctttgtgcgtttttccaccgtgcagggcttcagaggatctccggatacagtaagggatatccgcggttgggctaccaaattctataccaaggaaggcaactatgatctggtaggcaataacacgcccgtcttcttcattcaggatgccatcaaatttccggatttcgtccatgccgtcaaaccggaaccccacaatgaaatgcctcaagggcagacggcccatgactccttctgggacttcgtctccctgcagccggaaactctgcacaacgtcatgtgggccatgtcggaccgcggcatccccagaagcttccgtacgatggaagggtttggcattcatacgtacaaactggtcaatgaagatggaaaaagcactttcgtccgtttccactggaaaccgctgtacgggaaaaaatccctggtgtgggatgaagcccaggtattgacaggacgcgatcctgatttccaccgcaaggatctttggcaatccattgaagccggagattatccggaatacgagctggggctgcaactcatcccggaagaagacgcagaccaattcgacttcgatattctggacgctaccaagctcattccggaagcactggttcccgtggaaatcgtcgggaaaatggtgctgaaccgcaacccggacaacttttttgcggaaacggaacaggcagccttctgccccgccaatatcgtgccgggcattgatttttccgatgatccgctgctccagggccgtattttctcttacagcgatacccagcggcaccggctgggaggagccaacttcacggaaattcccatcaaccgccccatttgccccttccacaacaatcagagggacggcttccaccgcatgcagatagacgcctcaccggccaactatgatcccaattccatcgggaacaactggccgagagaaacgcctccggagaaaggcggcttcactaccagcccccagacggtaagcggtgtcaaggaacgtttgcgaagcccctccttcgcggaatactattcccacccccggctgttctggatgagtcaaactccggtggaacaggagcacattatcaacgctttcagctttgagctgggtaaggtgacgcgcccctatatccgggaacgcgtggtggaccttctgacacgcattgatccggacctggcaagcggagtggcccgcaacctgggaattcaactcaccagggagcaactcagcagggaacttcccaggcccgtctgcggcctggaacaagatccgtcattgagcctgtatgcccatacggacggcaacctcaaaggccttcgcgtctctttactggcagcggacggcgtcagcctgaaatccgtgaaagaaatctgcgatgccctgcatgaagaaggcatccacccccaaatcattgccccacacatgggaagcataacaacggaagaaggggaagagctgtttgttgacggaaccctgtccggcactccttccgtcctgtttgactccgtcatcgtcccggaaggggaacaaagcctcacaacgctcctgaaagacggagatgccaagtaccatttgcgccaggcctacaggcacttgaaggccatcggactgcccggcaacgccaaagccatgcttgaggcatcctccctgccccaggatatggatgacgccgggctgctcatgccgaaggacaccaagtccctgatgccccccttcatcacggccatgaaacagcaccgcgtctggagccgagaacctaaaacccttgatttcggagcctagattcgtttcttatacaggaaccgcttccatttacgggctgccccgccgaaaggtgcggcagccgtttttcactaaaaaatccgggggagttaaacaacacttcgggcaaattgaaaaagggagggagatacactcaaaacgggaacggaaaccggaatacagcatgatgataatgccttcttaaaagaaaaccccgcaagcctttaaacttgcagggtttattaatggtacacggagagggattcgaacccccgaccaactgtgtgtaagacagccgctctaccactgagctatccgtgcatgaggtggaaggaatatataccgggaaagcaggcccggcaaggagaaaatgaaaaaaatgcgtcctcatttccctgttctccatgactgtaaaatccggacaccacaaattccagaaaatggaaagaaggcagacaaggatttcctgtccctttccgggaatatgtttccgtattatttccggaacctgctcccctacctgacatctacgcgccggagcgcgcggtaatgcaggataatgaagagaacgcacaatacggcttcggaccaatagaacatgtctaacgcatcccgaccggaagtgaaaccgtaggagtgcagccccactcccagcatattgacgccccaccaggcaaaggcaatgataacgccgcccactacattgctgaagtggagcagccaggaagacagccatccggctttccgggcatgcaatacggtcaattgccacagtacaatcatcaacgctccgttttccttgggatcccagccccagaagcgcccccaggattcattgccccaaatccccccaaaaaccgttcccaccagcgtaaacaccagggaaaaacacaagatgccgtaagccatgcggtccagggattgttccgtttttccgccaatcaggcgcaagggggaagccagcaggtatatatgggagagcaccgccgccagcaacccggccgcgtaccccagcacaatggtaatgacatgggtggaaagcaggaagttggagcgcaggatggccaccaggggatccatatggtccacagcctgggaggcttcatacagaatacccatctgacaggagaaagccccaagcaaaagccccgccgccagtacgattccctttttactgaaaagttccaccacaagagcgcagagcactcccatgcaggcgatgaaggcaatggtttcatacgtgttgcccaccggggacctcatggtgatgagcatgcggatgaccagcgccgcggccagtactacggttccgcccgcgcctgtcagccacgccaggctgaaacctccgggccgaagaaaacgccgccagaggggagcgttggcggcagggcggaaaagcgcacagagcagcaggcacacgaacgccgccacaaaaacggccagggaaatataaagcggatccagacggtagtagaaaatttctctttccaggctgtgccgctctccggcggaggcagcttcattgggttgcgccagcttttccagcagcaggccttccgctttcatccgcagtgcggaagcctccgccccttccatgccgatagctttgcgttccagtagggacgccattgccaaaaaggctccggcagctttatccggggcagccgtccacaggcgttctccatcgcggccggcagaaggaaaccagcgtgggaattccatccgttccatggcggcagggttttccagcatgatccgggagacaagcatccatccccgcattacgtcaaagttgcgggaaagggacaaaatttccttctgggcttccgtcagattcgtttctcccaacaaacggatttcccggacggcacgggtcatttcctcccagcgttccgcaagctgcgcgtaggagtattttttacgcttgtctttctggtccggcaggtgcaggcgcctgaccacctcttcccgattgaccagaaaaacagggtattgttccgccagttccggacggaacatgcagtccagcatccattccaccggggagagcttccttttcccttccggcgtatcaacaacaaagcttcttttgcccagtgtccggagcagatggaagcccgcataagtagaaacaggcttcaggcggccgccgtcctggacggccatggccccggcccgctccaccaaaaagggagaccagggcacataatgttccaccagaaccggatggacgtcaggccgcgccgccagcatgccgacgccaaagatggccgctaccagcaggcaaatgccagccaggcgcagacgttttttcccgcctggggcggaaacggcctgcagttcatccgtcgccgccgttccggcagatgccagaccgggtttgcggcgcaggtatctgccaaaaacacaggcaaaatgccacagcagccctacagcgatgatgtaggaggaccatttgggcatttgctccaggggattatgggaagcacggagaatggagataagcctgcccggatgcagggaatcctggccccagctcatctggtacagcgtccagccggaaaggcgcagaggctcattcatgcggataacggcgtcatactgaccgccggattccggaaaaacggttatctgggattcataggatttaggcttggaagtccccggataaaactccggcacaaagcggttcaggcgcaaatcaaacggaagggaatactcgtgcacccggtccccctggggcagttccacctgttccacagccaccgtcattttgttgcccagcatgatgccggccagcagcagcaaaattcccccatgagccaccagcacgcctgcgtgcctccaagtccaccggatacggaataccccgcctatgagcaggttggcgaacagcaggacacaagtaatgcccatgccgggcaaaggcagggaaatcagggagttctccccgcccagcggtatcagcacataagccgccccgaaaaaagactctatggcagcctccgaccccatggcagaagacaaccgcacctggtgcagcgtcccggcaaaggtcagcaccagaaggatcagcatcagggcaatgcccaagccgtagcttccggcaaaattccagaggctgcgtccatattttttccataccgcatccgttcgttccctgtccatcagcgtaaggcgtccgtagtccaaaaagagggccgattgcacgatcaactcgtgaaaccggccccaatcatattcctggagaaaaggttattaaaagttatccgccagttcttcaaagaatgcctggggatgcgcacaggccggacataccttgggggcagtggaaccggtatgtacataaccgcagttgcggcacttccactggatttccttttccttggcaaaaaccctgccttcgcgcacattttcagccagcttgagatagcgggcttcatggtgctgctccacggaggcaatcttgcggaaagtttccgcaatggcggggaagccttccctgtccgctacttcggcaaatgcaggatacatgtcggaccattcgtcatgttcaccggcggcggcggccagcagacaatcctccgtagattccaggggagccgtgcagacggcgtgcgttacttcaatgcaagcgtctttcagcaatttgaaaaataccttggcatgttccttctcattgtcggccgtttccagaaagatagcggcaatctgttcgtaaccggccttcttggctacgccggcaaagtaggtgtagcggttgcgcgcttctgactccccggcaaaagccttgagaagattcttttctgtttctgttcctttgatggatttcataaattagtcatctggttgcgtaaacgaaagcatcctaataagacgccgtgaaaaaacaagcaaatattgaatgaatctaaaaaatagacatatccggaaaaacatacggcagtttccccatttgggaaaactgtcgccatgcacgcttctgctgtccccccatacgcgccggcagcaaaacggcatcccgggaaacaggcaggaatccgtaccgcagcatcaggcctaagcatgaaccggatcatttgacaccccctgtgcaaacagtaaaattaaacgaaaaaaacccttaagctccacccatgaatcccgccaatacccccttattggaaaccgagagattaatactgagaaaattcacggaaaatgatctggaggccctgttcaatatttacagcaatgaagaggtaaacacgtatttgccgtggtttccattaacctccctggaagaagcggcgtccctgttcaaagaaaagtaccgggaagtgtacaaacggccttacgggtatcattacgccatctgcccgaaaaacagcaacctcccggcagggtatatccacgcaggcacggacgacagccatgacctcggctacggattgcttcaggagttctggcacagaggctttgccacggaggcggccagggctgttgtcgcccggttgaagaaagacggcatgccctacatcacggccacacacgatatcaggaatccccgcagcggaggcgtcatgaaacagctgggcatgcgctaccaatattcctatgaagagctgtggcaacccaaaaatattccggtcactttccgcctgtaccagttgaatctggatggacaggaggatcgggtttatcaggaatactggaacaggtcatccgtccgtttcaaagaaactgatatctgaattcccaatacctggcctcatcttcaggagctccttcccgccctgggaaacattgcggatacctccgcatccggttatctttccaccggttttccggagaaagtcctgctccacggttcttccagcctgtccggaacgctttccaactcccggagtattttctcccgctctcgggaaatccgctcctgatccgcagaggccggaacaggctgctccccgggcagaggcatcagcccgtccgccgtcctgccgccgtccggggcaatcggcggagcaacaaccttgctgtcttcatccgtttccggttcagggctgaccggcttctgctcatccatctttccggtactttccggaacagccaggttccgatacaggaacaccaggtcccccgcctccacagcgccgctgcggatatccgcaggaatgcgcgcacgccccattcgctcctccgtcacaatcaggttggcgactctgcatttttcttcccggcccggagattgggagataagcacggttcccggttcataaacattcccggccagagcaatcagcacataatgatgattaggatacacctgctccaccttgcccacatatacggggggagggactgctttcttaacgggctgctgcacctgctgggaacaggaggcccccagcaccacaaacgccgccagaacaggcagggaaacaattcgtctcatggggagttttttcatcgtttcattccaccagcaccttgcgtggacggttggtattatccgccggggcaataatgccgcgggattccagcaaatccatcatgcgcgctgcacggccgtatccaatgctcaaacgccgctgcagcagggaggtgcttaccttacgttccacaacagccacttccaggcacttggcatagcattcctcttccgcgtcatccagcggactgtccgcacctccgcgggaaggctcgtccagggacttctgaacctcttcatggaatttctgcttggcctgggaagcacagtgggccaccagggcttccacttcatcgtcagagataaaggctccctgcgcccgctccacctgggcggaacccggcggcaaatacagaaggtctcccttgcccaccagtttttccgccccctgcctgtccagaatcacacggctatccgtaccgctcgccacctggaaagcgatgcgcgtcgggatattggccttgatcgtccccgtcaccacctgccttcttggcgtctgcgtcgccacaataaggtggatgcctgcggcacgggccttttgggtaagacgtccaatattcgtttctatgtccgctcctactgtctgcatcaggtccgcaagttcgtcaataataatgacgatgtaggggaagcgttcaggaataactccgtcgtcctccagatccagttcatcatcttcttccacaggccattccccctgggattccaggtctctggcaatggattccgccaaagattcatccacctgcccgtcttccggttcctccgtctcttgcgcaggaacatccggcgggcgcttgttgaaagcttcaaagtttcgcacacccaccttggcaaagcaatgatagcggtgctccatttcattcacgcaccaacgcagggcattgggaactttcttgggatccgtcaccaccggaacaatcagatgcggcagcttggaataaggctgcatttccaccactttcggatccaccagaataagcctcagttcatccggacggaatttcaggagcatggaggaaataatgctgttaatgcacacggattttccggatccggtggcgccggccaccaacaggtgcggcatggacgccaagtccccgatcacggtacgtccatacacgtccttccccagcgccagcggaatctttttcttgggggaacaaaaagcgggatcctgcaaaagttcccgcaggggaacggccaccttcttccggttgacgatttcaatacctaccgtatccttgcccggaatgggggccacgatgttcacgctttccgccttggtcgccagcgcaatatccttcgcatactggtcaaaagtatttacgcgcacgccgcgcgcgggatacacttcataacgggtgatggtcgggcctcgggtaatatccccaggcgtcacgtccacgcggaatgtcgtcagggtatcaataatcttctgctgtatttccagcatttcttccttgtcctctgccgtagggccttccggcttttcttcataatgcagcagttcaaagggaggcagctcatactcgcggaattcctccgtgggaggagtggacaatttggaaaaaggctgctctttgggcgcgggcttcatttccgccggttccgcaacggtaatcctggggcgcggagccaggggaaggcggccctgggttcgcggggcgctgggaggcggaacagaatcctccggcttggacggagcaaccgccgccgcttcatgatacaaactttccagatcgtccccggtgcgctgcagacggggaacggaagcccggccctttctaaccggcctgggagcggacaaagcggcatcttccatgctggccctcacgcgggcagcttccctggcaagcagagcggtctgtcgcgccagttttttttccttcctgttcatacgccaggcacgccattcccgcagcatggcccggcaaaacggccggggacgcatcccggcggcataaaccaaggccagcaaatagcccagcccggaaaacgccagcacagcggatctcccggccaacggaagaaacagaccagttcccagcaaatggcccgccagccccccggcgccctgaatctggtggcgcgccacccattcattccccggcacatgcccggccgtcagaaacaggcatccgaacaacaacaggaacaaaccgccgtaaaccacgcttcggggcagccttccatggtggagcaggcggtaaagcccccaccactccaacaggataaccagcatccaggccatgcctcccagcatccaataaaaaattcctgcaccatataatcccgccgttcccagcacattggaggtacccggtataaccagcccggagccatttaaataactccagcctatttcccgcacatcaaatgtcagcatagcagccagaagagccccccccccaacaaagacacggcaccccatgccattccaatccaaacaggggaacgcccctcttcatgctcaaatgcatgacgttcctgcatatccaatgccatacctgtttctattctagcaattcttcgccccaaactcaaggctaaacagggaagaaaaagaattgcccgaatccgcttccctcaaaacaggaattgccggcttacggaccggaaatacggtttttaaacacttttgccactctggaagagtatcgccaggaattcccttttttacctgagaaaagaccgcccctgcaccgcaaatcaataaaaccgaatcaatttcaatgattatttttcatatccatttgattatttattattagcctaaatatctattaaaaaaaatgtgccgttcgacattttttcatgagttatgaaacatccagcgaattccaaatccgttacttactgaaatcagttgctgtttacctgctatttatgagaagaatcgcctctatttccatgttggctgtggtatccgcgctttccgcgagtgctgctactgtattatttgattttaacagttctctgcttccggaaactcctgccaagactgtttctgtaaccgattccggttcaggatttgttgcaaccctggctacggcatcctcttccgcgaatctgggttctgcttcttccgccgcttctggggactgggtttcctccggaacttcttttgatacacagggattggattctttcatggaaaaccagatttctttcggaaactcttggcagacctttatctccggccccaaaggagcttctctttccctgactatttccggtttggtggctggtgcttcctaccagattgcccttgttaccgggtgtccttttgagggggccggtgcctggaattccttggtgacttccaatacctacgacagcgcggctccttccataggtgcgaactctcagacaattcaggcccggactcccacggggtacaccattagtgacgttattgccaatgaagatggcgaaattattctgacggtgaatactcctggttcctcccacacgcctacgttcaatgctctggctatttccggagaaacagccagcgttccggaaccggccacggcgtccctgagcctgctggggctggcggctctgatggctcgccgccgaagagcttgagaacctcttttccggcagtaaaaaatgttgttgcctgcaaggttctgccttgcaggcaattttttgtaatcatccgatttgagaaaactgggccgtccgaataaccgtttttccctggcggaactcttgctccggaggaaatgaggctcctgcttctttgacattgcgggaacgttcttcatccgttactctttgctctgccgtagagagaaatgatcatcattgcgtggaacgcaacagggaattgattccgccggatacgggtatgttccgggtcatggacggggcgggggatggaatccccggtatctttgtggatcagatggcggatcgtattctcgtctccacgcgcggatgttccattactgcggacctggaaagcgaactccgggatactggcatgcccgtattccacaaaaaactggaacaaaaccagaaagaaacgttctgaacatcttggtcttctgtggcggcgttattcccgtccgggactatgacttcctgaaggaaaacggagttgtggtcatcatcttcggcccgggcaccaacattccggaagcttccagggaaatcatggaagctcttaacgaacagtatgctgaataagcggaaatcgttgttggtcagtgtaatgacctgtgagaagccgaatgaaaaatccggcctctttttttgtgagcggattaactatccgctgtcaaactatttttttaaaaaaaaggaatttacgcagattcacaggcggaaaaaacagattggcaaatcatagagaatatctgtgaatgttttttggccgagcttatttcaaatttcatgatatataataaatataatttgattttcaatcaattatgacatttacccatcattgtgcgaggacattgtgcaatacatggttttttccagcggatagttaatccgctaattgagaatgctcttcctcatggcattgaaattacaatccgttaaccagtcacgactttcatgtgcaggcaagtcagcggccactccccggcattttacccggcggtactgcttctgccagtatcttttcattattgatgattattttcccgatttttccatgtgatgggaaatatatcctcctttttcaaaccctttcttgtttcaaacaaaaaaaatcaaaatcatcaaatttaaaatgatgactgaacatatagcggcctttttctttcaaacttccggaagattaaaagcatggagggcatcacgccattcccgtggtgcttccgggccaaggaagaaaatcctttgagccggaatggcctctttccctgtttttatcgccatctttcctcccaaaagcaacgtttcctcctccctcaccaaatgaatacaaacaacctcatcaataaagtcattctgtgctccctggccatggccggagccgctctcctgccctcctgcgtcagccccaaggaagtcctctatatccaggatgtttccggaaactccagggaaaccatcaaggcaaactaccagacaaccatccagaaggatgaccaactctatatcgcagtcagcagcaagcagccggagctcaccgccccctttgccatgtctgaaatcggttcctccagcggcacctccagtaacaaacccaaaggatatttggtggatgcccagggctgcatcgtcctgcccgtcatcggcaaaatgaaggctgcgggcaaaacctgctcccagctggcctccgacattgccgctactctcaagaacaatgactacatccgggatgcctccgtcaatgttcagatcatgaacttcaaattctccgttctgggcgaagtcaatgctcccggaacctacactattgaaggacagcgcgtaaccattcttgaggccatcagccgggccggagaccttaatattgacggcaaccgggacgtcacgctaatccgggaaaccaacggaacccgccaaatcgccagtatcgacctgcgcagcaaggatttgttcacttctccttattattacatccagcaaaacgacatcatttacgtgacaccctcagaccgcaaggtcaacacgcgcagcgacgctgctcaatggtacggctggggcctctccgggcttggtgtcactctggccgtgatcgccctgtgcctttaacggacattccgcctctttctcatccggcttaatcatacctgtgaacggaaatatagggacggtccgattgcatcggaccgcttccccaggggtccagtatttccaaacaacattccaccctctttcctccatggcaaataataccgctcccactccgcctgttacggaaaacacagaagaaacaacttccttggacacggtgctgctcgtcctgcgccgctactggtttatcatcattctggcagccctcgccggaggtacggcggcttactacctagccggccgacagaattacatttaccagaagacggccagcgtcctgatgcgcgatgccaaaacgagcagtgacgcatcttcggaacgcattatggcagagctgggcatcgattccggcgcagccaacctggccaacgaaagcttcatcctcaaatccaccgcattaatgaaaaaagtggtggaagacctcaatctcaacacttcctattggcaaaaaaaagatttcagggaaatcgacctctacaaaaccagccccctgctggtccattttgaacggatcgataagcaacgagcctgtaccctgcagatcacgcctctagatgaaaagaggttcatgcttagccattccaataaccagggggaatcagtccagctggaagggttttacggaaaacctcttacacttccctttgccgtcatttccatccatccaacatccctgatgaccgatgcgtggaatgaaaaaactgtcattgtccggcacaagcccgtgcttgaaactgctaacaacctgctccacggactgacagtcacccgtccggacgccaaagaatccagccttctggaaatgtccctgacggccagtaatccccagaaagcggaagacgtccttaaccacctcatccaggtttacaaccaaatttccaaggatgaacgaaacaaggcggcccttaaaacggaaaacttcatccagagccgcctgaaagaactcggagccgccctgagtgacgtggacaaaaagatcaccgaattcaagacgaaaagcgacattgtcaaggatacggataccaccatgagcgcggacttcagcacgtcccaggcgctggaaaaagaaattttcgatctcgaaacacaaatcaaactggcagccatcctggcagacaatcttaaggaaaccgaacgcaaacagggcctgatttccgtggaaaccggacttcccgattccggtattgcccggcagatagaacactataacgaagcctatctggaatatcagaaaattgcaggaagcgccggttcccagaacccaattacagtgagcttgcgcgacaggatgaattccaccagggcggccgccaacaaagctctttccaactaccgtagcaatttgaatctcaagctcaaccagctcatcagcaaacgggattcccttactgaacgactcacggagacagcaagcagggaacaggaaatcattcccctggtccgcgaacacaaggttaaggaggaactttacctgatgctcttaagcaaggaacaggaaaacgccctggctatggcggtaacggaatccagcgcccgggttctggaaaccgcccatgggcccaactttcccatttccccaaaaaccattcaatacatcgcgggaggaacggcgggaggtgccctgttcagcatatttgccttcatgggagcggccatgttgaacaacaaggttaacaataaacacgatctcccgtccacaaacaggcagcctgtcattgccgaactgccccagatgaacaaaaaagaaagtagaaataccggtcttttcattcaggacgaacattccgtcatcgcggaatgcttccacatcctgcgcaataacgtagattccatgctccccaggccggaacagggaggacacgtcattctggttacctctaccctccccggagaagggaaaaccttcacctccgccaatctggccgcagctttcgcctatgccggcaaaaaagtactgcttattgacggagatttccgcaaatcctccctgacccggcgtctcggcggttccggacgcaaaggactcacttccattctgctccaacagagctccgacaccaccggcatcattcgccccctaagggaaaactcccgcggaatggatatcctttacaccggccccatggtgcccaatccggttaccctgctcagtcatcctctgctgggtcaaatcctgggcatcctgaaaaaacaatatgacgccgttatcatcgacgctccgccctacggcattctggcagacaccgccattctggcatccctgagcgatattaccctgtacgccgtgcgcagcggaaaaatcgacaaacggtatctgctccaaatccagcaactggccgatcagggaaaacttcccaatatggcgtacatcatcaacggcgtcaacttcaagtcctccagttacagctactatggctacggatacggttaccaatacggatacggctccggagaaccacggcaaaccaccaggaaacaagattaataagacacaggcaatgcataagcccaaggctttcttccctgctctttactcttttcggcagcaatcatgttcggcaacctgttcactccccggtatgcgacatccagcctctttccggacggcatggacatgcacacccatattctatggggagttgacgacggagccgcctgccttgaagaaagcctgggaatcattcgccggctcaaggccatgggactcaaaggagcttactgcaccccccatatcatggcgcgctacccggacaatacgcccgatttcctgcgccgccgttttgaccagttgcttgccgacaccagggaagaacaattccagctccggctcgcggcggaatacatgctggacaaccagttcaatgagcagctgcgccgatacactcccctgacctacgacggaatccacctgctggtggaactgccccagtactaccttcctggcgcctggaaggacatgatcagctccgttcgggacatgggatacgtccctgtcctggcgcaccctgaacgctatggccgcctcctgcaacaggaagatttcctccaactggcccggcaggaaggcgtcaaatatcagggcaatgtcggctccctgaaaggattttacggcaaatccgccgcagccctggcacaaacgttccgcacccgtcaactttacgaatggtgggggacagacagccacaacatcgccatggccaaacgcatgcctctgaaaaactaactccgcctaccctattaacaacctctcgtactacacccatgtcagcccctataactaatatccccttcagcaacccgctgtatcgtaatcataatttttacagacgctacggaaaacgtgccctagatttcacgggagcactcttcggccttatatgcctgtttccggtattagccattctggctattctgctggccatcgtccagaggacatctcccttcttcctgcaaaagcgcatcgggcacggcctcaaaccctttcatatcatcaaattcaaaaccatgaaagacaccagggacaaagaagggaacctgctcccggatgaagaacgcacaacagtcttgggctccctgctgcgcagcacctccttggacgaactgcctgaactcatcaacgttctgttgggggacatgagctttatcggcccacgcccctggattcccgatcaaatggccatttttaccccttccacccggaaaaaaagaatgtccctgcgcccgggcatcacggggctggcccagattcgcgggcgcaacaacctcaccttccgtcagcgggtatgttatgacctgagctaccaacgccacctgaccttccggtacgacctgaatatccttttttacaccttcctcaaggttgtcgagagagaaggtattcagcagcgtccggatgccctgagtacaccggcccgtgtactgaagcccagagatttgatgacctacggattgaaagaaaatacgcaactcattttaagaagtatccgaaaagaacctgtcccctccttgagcgtacccgcccatcccttgatccccaaagacttgcctaccaaaggtctcagggcaaatacccagcttatcatgaggagccatcagaaaagcatccaataaatttcctccactcccccccgccaaaaatgaaaatttcagtcattacggtttgttataacagcattgcaacactgcaagacacgctggaaagcattctgcggcaaacctacccggacgtggaaagcattgtggtggacggggccagcaaggacggaaccgtggaattgattgaaaaatacagtcatcaattttccggccgcatgaaatggctatccgagccggacaagggaatttatgatgccatgaacaaggggataggcatggccacaggagatgtcatcggttttctgaatgcggatgactattaccaggacgaaaatgtactgaaagccatcgccagggcatttgcctggcatggaacagatgccgtacacggtaatctgcactacatcaacggagtaagggacaccgtacgcacatggcgcggaacggaatacagtcctggatccttccagcgcggctggagcccggcacaccccacattctattgtaaaaagggctgctttattcgttacggcggctttgacccctctatcggcagtgcggcggattttgagctgatgctacgttttatagaaaaaaaccggatctccaccacttatatcgaccgcgacatggtattcatgcgcactggcggctccagcacatcgggtctgcgcgccatcttgcggaatacgcgccagaacaaacaggcattcagaaaaaacaacctcccttacccgtggcattatgacatatcccgcatattccataaaatcctgtccttaaagagcccgttcctatactttatggaaaagaaataactggaaatcaaccaaacttcttctccaatcataaaaaacggcctatgaataacctgaaacagaatgctcaaaccgcagtcaaatggagtgctattctcacatttggcaaccaatgcgtaagttttctcattagtgttattctggcacgtttgctgactccgtcagactatggcctagtaggaactataagtatctttatagaaatttcgggcatttttgtaaccggaggactcagcatggcacttatcagaaaaatagaccggactcaaacagatcttgccaccgttttttattacaatactgctgtctctattttaatttacctagttctatacacttccgccccattcatagcatcctactttaatgaacctcttttaacagaaattacccggatttccggacttaccctgattacaggagccttgggagctgtacacggcacattgctccacgccaacatggaattcaaaaaacaaactattttctccattcccatctttattatctccgggattatcggcatttttctagcgtatatgggttacggagtatgggctctcgtgctacagggttttttatcttccgtattaacaactgttgcactttggtattttgtaccttggaaaccgagtttggagttttcatggaaatcctttcattcgacatttggattcggatgtaagctgatgatttcgtcactccttgattcctgttaccggaatgcctatcaattcgtcattgccaaaagattctctgcagcggatctaggctattatacacgtgccaacaccatggcccgcctccccatgtcttccctgtattccattatctccaaagttacttaccctttgatgagtcaaatacaggataatgatgaacagctccaacatgtattccggagaatccttcgcatgatggcatatatcattctcccctgcatgcttttgctcgtccttacagcatcccctctcgtttctgcgctcttaacagaaaaatggcttccttgtgtgccttttcttcaaattttatccctctctctcgcgctcactccaatgaacgccctcaacctcaatctgcttcaagccaaaggaagaagcgatcttttcctgcgtcttgaagtatggaaaaaaatcctgggcgtactgatcctgtgcgccaccatacctttcgggatttttttcatgtgctgcggcctccttcttttatccattctggaactgggaattaattcctactataccaagagactgattcaatatgggatcaaaaagcaaattaaagacattcttcccatcatcggcctcagcattgcctccttcttctgtgcgctccctgccttttacataacggaaaatccctttttcatcctggcaatgtcttcctgtatttacatagccatttttattctattatcgctcttcttcagatttcaggaaatatatgatttaaaaaacatggttcttaataaataaaatcatcccatatggcccataccctttccataatcatcccggtttacaacacttcggcatttttagagaaatgcgtagaatccgtattgaagcaaaacgtggaaatggaaattattttgattgacgacggatctacggatgacagcccggccctttgcgaccgtctggctctttgcgatgcaaggatcaaggtcattcatcaggccaattccgggatatcttccgcaagaaacagagccctggatatttgcaaaggcaaatatataacgttcgtggacagtgacgatgaacttctggaagatacttacaagcccaatcttgaaattctagaacaaaacgaacatatcacagtcgttcaattcccatatatttatccgtacaatcaacccaatccccgcaaaggggcagattctgcacaaatgtgggaatgtgaacgtgacatcctggaagcctgcatgtctccagaagtcaatcacgccgtatggaataaaatattccgccgggccgtgtttgaccaactccgctttccagaaggcaccgtttttgaagatacttatattatccctgacctggcaaaaagaatcggttgtttatattcatccggcttaggaggctatggatacaaccttcgtcccggctcaataatggcatccggagctaacccacaaaaaatgcaggagcgtttccaggcttatgaacggatcgtccacgctgcctctggctatcctgatcttcacaattcccccctgtttgtcaattattaccatcaatgctttcttatgatggtggggattaacagaaccccaaaaaaaatctcctcccgttatgaagattctctcaaccatttccggaccatttcatgcagcctttcctccattttccggacgaaaaatcttccggtgaaagaaaaaatacggctggttttatcaaaaattgcaggaattcccctttatttaaaatatttttcataatctcccatgaaaaaaatattactatgtttctttattcaacttcgcggcgtatttttgaaaatatcatacctgttcggccgccatccgaaagtcctcagcatcaaagattccctgtcatatattcttaagcaccgcatatccatcagcaggtatggggatggggaaatacttctcatggaaggctatcctattggatttcaaaaagaggatgcggcattagccaggcgccttagggaaatagcccggaacccaataccgcaacaccgggtctgcatccctgatgttttttccggcatctcatcttacaataaagaatccagaaatttctggaaggattttttattccggggaaacggactgacccttttcaacaaatatttccagtccggcccctatctaaacacgcagatcagcagattttacgaacatctgaaagacaagacggaaactccgcaatacatcagcctctggcgccagattttccataaccgtcacctcattctggtggaaggtacaggttctaaactgggttttcacaatgacctttttgaaggagccgcatccatccgccgaatcgtctgcccggcggaaaacgcttttaactactaccatgctattctggaaacgacgctggacaaagcaaaaggaatggattttctggttctaatcgccctgggcccaacagcaacggtcttggctcatgatttagcggaacacggagtacaatctattgacgtaggacatatcgacatcgaatacgagtggtttcaaatgaaagcaacgtcaaaggttccggtgccgtggagatatgtcaatgaaacaggaaatcgtctttctgaactatcttccgacccggaatataccagtcaaattattgctcaaatcggcctttcatgactctagattctccgcctcttgtttccatcatcattcctttgtataacgcagaggaaaccattgattcatgcctgcaaagctgcctggggcaaacctacaaaaacctggaaatcatcgttattgatgatggctcttccgacaattcccgggcaattgttcaggggtttgatcatgcctatccccagattcgcaccttcaggcaaaacaggggcggtgtcacggaagcacgcaattacggtatgcgaaaagctaccggacaatatttgttcttcatggatgcggacgatgatttaccggctcaatccctggaagttttggtagaacgggctgtggaaacccaggctgacatcacagccggtaccactcttcacttgactgaaaagagagagctaatcgcccgaatgaactatatccctttttctaccctttccggagaagaatggctgacaaccatcaggaaaacatggcaaggccacctatgggggcttttgtttagaaaatcattgtttgagcatcctctgctttgtcctctctctcttaaaatcggagaagatcttctgcaagtaactcaacttgccatgcgcagtcatctcgtagccatgactccacaaacagtttaccattatattaaaagagaaacttccgccatcaattcgcgccagtttcctccagacattcgacaaggggatgaaatcttgtttgtagaaaccatgctccatttacagaaaaaggcttccacaagacgaatgcggacggaatgccgccttctatccctgtttgcagtacttaatcttccgtcgtcaggttaccgcagcaaacttctccatcacttccgcacactctatttatcttatttgcttacggatcgccacctcatcaaaacgctctggaacatttctccccgcctccatattggaatgattttggacttcatcaaataaaaaataccaattatggcctgtttgctatctaaaatatcctttattagaaaaatccatcgttttttcttcagattatatttagaaaaaaaacggaagttgaatatcgtcaaaaccctgtggttcaatattagttttttaccatggaggcaggccaaacactttccgtttttcatacacggatcattaacggtagcacgggaagggggagctctgctccttgatattcccgattcagaactgaaaccgggactcattcgtctcggatatgattatgaccggttcagcactaactatgccggcactttgcttcagctatccggtaccatccggtggaaaggccctttccgcagcagcgtcaatgtggtcattggcgccagcaagcctgagtcctttctggaatttggccgttatgttagtctcggcgcccagggttcaatcagagcttaccgctctatcgtcattgaagactacgtcgccattacccatgactgctgcatttacgacacggatttccatccttttcgtaatatacggacaggaaatattaatccatacgccattcccgtaaaaattggtcagggttctttcatcagttcagggtcttatattgccaagggaacggttctccccccatattcgctagtagcatcccattccctgctcaatcgggactattctctggaaaatgtaaaagctccattcatcgcaggcatgcctggcaaaatcaaatcgcaaggacttgtacgtctctttgaaaaagacctcgaaataacagcctctgaacatttttcgcaaacagattgtcccttaatcgttcacaggggaataccgtctgatcattccggaagggaaggctctttcatatgatagccatgaaaaatatactcatctactttgattatcccatcacttccattcagggaggcacggaacaggcctcctttctcctggccaggctgcttgttcgccaagggttccgtattatttttctttctcttcaccctttcaaagaaaaaaataatgaattcccgcaatactccctgccggattccgaatacttgttcagcagacgcaatgccgattttacagaaaaactttgcgatgaacaaaatatcaattttattttgaatgaaggagccgcctccgactcttccttcttcttcagccacgcccatttgaacacaaaagccaccatcgtttccattattaacttctccatctgggaaggacttgatcatttcctgtccctcattcccccatccgggaacacatggctagccaaattgaaaacagttgcacgcgttgtatcggctccatggaaaaaatacatggccattcgcaaaaagaaaacaaaactaaatcatttgcttgaatattcagataaagtggtggtgctttctcaaaaatatattcaggactgcctttcacttacctccacccataatgcccacaaattatatgccatccccaaccttctgacattccaaattcctgaaagcttatcttccggtacaaaacaaaatattcttctttacgtagggcgcctcagttatgctgacaaaagagtagacaggctgttgagtgtatggaaaaaacttcaacctgtccataccgattggagtctctatattgtcggtgacggagaatacagagaaaacctggaaaaaatatccgaagaatatcatttgaaacgaatttttttcatgggacatcagaaccccgaacctttttacaaaaaatcaaaaatcgtatgtctcacctccacacatgaaggaatgcctatggtggttaatgaagcgttggcctacggatgcattcctgtggtttttgacagtttccatgctgcaaaggaaatgattccgaatacggaaacaggaagacttgtccctgctttcaatcttaagcaatacacaaaaaccctggacggcctgatgaaagaacgctacaggaggcccaactttaaagtattggacaattacaaagaagaaatgataacccgaaaatggcttcatgtcctgaaaaacggcaatgagtaacattattatttacctacctaacgaacctctgggcaaacagggcggcatggaaaaggctacccatcagttggcatgccttttacgagattccggacacaatgtcagtttgctctgtcagcaaaaaaacaggctgaatgtcccctatcgccctccggtccctcttattttcatcccccaaaaactgaataaaaaagagaaaaggaactttatcaacgatcttatccgccaaaaacaaacagaactcatcattgaccagacggaaggaggcatcataggaaaatatggcattttcaaaaacagaaaacagatacaatcaaataaaataaaatttgtagcagtccaacatagttcccagtatacttatctgaaatactaccgctttattaaaaagaaacattttgaaaattccttttcaggcagactgaaaaatttcatctataacaatatttatttgaatataaagaggttacgggcctgcatattgcagaaaaaactattccgtgatcttactctcaactacgaccggatcatcaccctttcttcaggaggaattgaagaattccaaaaaatttattcaaagactccttcctgtaaattaacatctattcccaatgtcattcccgatttagctcagaataccccgccctgccaaaaggaatgccgctgcttattcgtcggcaggcttgataacgcagcgaaaggaatagaccgcctgctccgtatttggaaaatttttgaagaaaaatttcccggatggcatctggacattgtaggcaacggccaggatgccggcatgttgaaagaaatggcacataagctgaacctcaaaaatatttcttttgaaggatttcaggagcctgaaccctattatgcgcgatcctcgcttttttgcctgacttccacctttgaaggctttgggcttgttcttgcagaggccatgcaacacggttgcgtccccctggcttttgacagttacccggcagccagagacattatcctgcccggaaaaacgggggaactgatccagccattcaatgaacaggaatacgcgaacaaacttatttctcttgctgccaacccggacgacttgggcatcctagcggaaaacgcccgtgagcatattaaagcattttccccaagtaagatatcagtcaaatggaatgttctcatacaaaacctatgaagcccaaagagcaatatctcgaagcatcggcctcacaataatagactaatgacaagcagcatgaaaaccagctacaatattctgattactacgacaggacttgcctctgtaggccaggggggaggaatttcctcttatgtccatgatcttgctacaggccttgtttccgccggacatcacgtcaccgtctatttggtcagggaaggaaaagaagtattcccacacaaaacaaattataactattcctttttccatattcctgccgaatatcggcaggaaaaatcagctgtcattgctctcctggattccatccggactcttgcccctgatattatcatcaacaatgatgtttcctatctgtccggcttatggccggttttagaccagtcaattgtcaaaatatccgtgatgcatggattttatcatggaaaaactctaaccaactctggcatacaaggtaaaatcgcgtgctgtaactggccatatgtcgactatatcgtttgccaaaaccagaccatgtgcagggaagcggcggccaaataccggattccttcggataaattcgtttgcattcaccagaccaactggaatcaatctcctttcttttccgaacacaaagagaaaactcagaattccatcaatcttatatgtgcctgtgggcaaagtaaaaacaagggagctttcatcatgcgctccctggcggaaaaacttatccattctcctttgaaatttcatttgaactggtgccttagcgtttctgaaacgtggcaagaacgtcttcaggatccacgcatcagtttccgtggcaatattccgcgggatgaatttctgcaacttcttgaaaaagcggatgctatcattatcccgacacttttggataccggccccatgctggttgtggaagctctttccaccggaaccatccctatatgcaatcttttgaaaagatcagctattccggatttgatagaaaacgggaaaaacggctttctgatccccgacaataaaattgacctgtatttcagagtcattgaaacccttgctgaaaacaaaacaatagccgcttttggcaagcgatgccatgcatatttccttaatcatctggaacccaaaaaacagctggagcagtatgcctatctttttgagcataagacggaaacgcctccctcccgggtcttttccgacgccgacgtaatctgtttccatttgcacaatgtatcaggctatcctcgttattcccgcaaaagaataatcaataaattgcttaccatccaggaaaagataatcacatacaaggattattcacgtttttttcgctttattcttgattaaaatatgaaaaaagcattccttctatttttattaaaactgctcccggaaacaagatgcttctccattaagagaagtcttctccgtctggttggctacgaaatagggcatgatgttcgtgtctgctcctctgccaggtttctgggtgcgggccatattattcttaaagaaggaacctggatagggcatgaaagcatgctggtctccacatccctgatttccgtaggcgccaaagtagatattgcccccaaagtctatattggtacaggaacgcacatagttgacccggtaggggaaagaacggctggacagggtatttccaaagatgtggttattgaagatggagtctggatcggcaccggcagcatactcctgccgggaaccagaatcggccgtaaaagcgtcatcgccgctggagccgtagtaacaggaaacataggaagcctgtgcatcgcagcaggagttccggccaaaccaataaaaaacatatcctgaatgcaaactatttttaaatatatttcacagcacggcgcatgggcatttttattcatggcggccatatccacttcccttctgggaccgctgaatcaattttcttttctttataccgcagctctgctggttcttcctttgaacatttctgctctaagaaaaataaccaacatcaattttcttataatttttttactcgctgcgtgttccgcgagcattattctggcagatcccgctgctattttcaagccatggcaacggctggtcttgacagtcagccctctggtttcatcaaagcaattggatatattccgcatccaagcctttgaatggtgcatgaacctatgtgtctttgtcggagtagcctccttcttctgctacttcctaggcatcaattacatgagaacaatcatcaacgttagtgattccttttcaggttcatttggcggaattacgccgcaatccatgcttcttgggccggttgccggcattgctgcgaattggcttttatacaaaatcttgaaacgatatttctctcaaaccactttctctccgctcattctgctaatgctgggaacctgtttgtgttccatgcttctctcatcttcccggggcgctttcctcgccacggtgatgacggcattgtacgtcctgttcatgtttactaaagaccatatacgcaaagctcccaaaatcatcttcgtgcttcttctatgcttcacagcagcatcgccccttatcggcaactttgctgacggcttgcaaaacaagcagcaagccaatatggaaaaaggcggaactttatcctcacgacaaagtttatggaacgaacgaattaaggaattcaagtcttctcccatatacggagttggcttctcttcccaaaaagaaatacgaattgatatacggactctgaataccggagccgtggaaccggggacctcctatggagctgtcttcgccatgaccggcctcttgggtggaatcccatttttaatgattcttgccagtcagatcctgaaaaaaccgtcagctgcattcggaatgcatgtcatttcgcctgcccaagtctgtcttgtattctttggaatgcatatgatggttgaaggctatgtctttgcggcgggaagccctctctgcgcccttctatggctttccgtaggagccgcttccgcatggcagaataaaaatatcactaacattgcatgcctatgaaattcctcttctggcaaaatatgatcagcatccatcaaacagctcttctcaatgccttggccagcaaacaccaggtaacgctggccgtccaaagagcttttgaagaggaaaggacggacagtggatggaaaatcccggatatgggaaatgtccatcttgaactatctcctgatgaacagcgtattcatcaactgattctttccaatgaaaccgccatccacgtcttttcaggaatagatgcctatcccatggttttccgagcattcaaacaatgcatccagctgaaaaggactacgctcatctacatggaaccctatcagacaggaggtatttccggccaactgcgccggcttaaatacgctcttctttatttaaaatacggaaagaaaattcaagccttgctggcaacgggaaaattcggcgtgcaagcctaccggcgctccggatggcctgcatccagaatatttgaatggggctacttcacagaacaaacgaaacattccgcagatgaacaaaataccgaccaacaaaacagccgaacagcccccagactcctatacgtaggaaggctggacaacaacaagagaatcctccatttgattcatgcattaaaatcgttccgctttcaaattgacacttttaccgtcattggtacagggcctctggtcaaagaaacggaatccctcattcatgaagaaggcaacttccgttaccttggaaaacaggcaaatgaaaatgtcctgcgcatcatgcagtcccatgacctccttattcttcccagcatgtatgacggatggggcgccgtcatcaatgaagcgctccagcaaggcatgcgcgttttatgttccgatcgttgcggcgcgtcatgcctgctggacggcatacataggggaggaacattttcatggaatgaaaaaggcagcctggaacgggagctgcgccattggataagtaaagggccaattacgcaaaaagaacgaacaggcattgcatcctgggcaaaaacaaccatatcagggcaggctccggcctgctatcttacttccatcctctcattcattcagggtaaaacatcgtcccgaccattaccaccttggcaagataaaatatgactctatgaacattttacataccatcgcttctatggacgctaaagcgggaggtccaacaacctgcaccttcgacttagccactggtttgaacgctctaggatgccgaaccgacattctgaccattgcttctgggaacagggccacctcttctattcaggccccttttattaaaaccgtcccttttgacgcaaaaacgcctcttcaaatatcccgccattgtagacattttttacagcagaatcagcaatatgatctctaccataccaatggcctatggctggacattaaccacgccacctgcgccgcggccagaaaattccgcaaaccctgcgttctttcctctcatggcatgctttatccccgggctctggaaagaagcttctggagaaaaaagctcattctttccttaggccacaggaacgatatcgcttccgctacatgtcttcatgccacatgccagaaagaaatggagtttatccgaacctttggttataaaggacctatagctgtaattcctaatcctacccctcctgtgaaatggattgacaccattattgaaaaccattcactaaaacgcataggttttctaggacgactgcatccagttaaaaaggcagataaactcattaaagcctggaaacaattaggtaacaaagtggcggatgcagaactgatactgatgggtgaagggacgccagaatatgagaagtatttaaagggtcttgcagctgaatgtaaatatggtcacattacttttcatgggtttgtaaatggtaaggccaaattccaggaactggccaatttgaaggttctgtgtcttgttagtgattttgaaaattttggcatgactgttactgaggctttgtctgtaggcactcctgtaatagccaacacgaccactccatggaaagatttaaatactcatcactgtggatggtggataaacgcaacagtagataatatagccatcactatagaaaaggctttgcatctatctgataaggaaatagcctctatgagtattcgtggcaagaggcttgtttctgataaatatgcggctgataaggtggctgaaatgatggctacactttataaatggttattgggagaatgcagtaaaccggaatttgtatatgaatgaaacaaaattgatttatcgcaatacctccatgcattaaacaaaaatcaagagaccgccacttaatatggaaaagaagtaaccatgaaaaagataattatatctatagttaccatagtatataatgatcataaccacattgaacgtactatacacagtgtcttggaccaagactacccttacatagactatgtaattgtagatggcgcttccactgatggcactaaagaatgcatatatcgctatgaagcgtttttaggaaccttgatctcagaaccggataaaggtatttatgatgcaatgaataaaggtttacaagcggtgaaaggtaattatgtactatttatgaatagtggggactgctttagcgatcagtcagttgtaagcaaaatcgtaaattacatcaagtcttccgggtattttccggagctggtttatggcgattatcgggaatcttccgtagaaggtaagtcacccataataccttcacggagttataaaaaaatatggtatggagctttcgcttcgcaccaatctattttttataattgccagtttttaaaggagaaaggacttaagtatgacttgagttatcaaattgcggctgattataaattaaatctcgaagtagtgaaatatgccaaaggaaatattttacaagtccccatgtgtatatcggattttgacattaccggtatttccaacaacaaccaagcgttaggtttgacagaggctgacagagctagaaaagaggtactgggcatgtctctattagttaggacgagtatcatactggtttcatgtatcgcacgattcatgaagaagtatctgaatcctatttaccgaaccctaagaatgaagcgatgaaccttagccaatataaagaatataaaccccatttagctcgaagagccatatggtaccttatcaaccataccttattcagatgtctaaagggaagaccatttaaccctgttcgcatcgcattgctccgttgttttggcgcttcaatagataaggatgcatatatctattcatcatgtaccatctttgctccctggaacgtgaaaataggaagggcttgcattggacctgacacaaatctttatagtaaagatatgattacagtaggagatgattctgttgtttcacagggaagttgtttgtgcacagcttcgcacgatatttccagtttaatgctgcccctacaaaccgctccgataatgattggcaataacgtatggttagccgccgatacctttgtgggtatgggagtaaacattggtcagggcgccgtggtaggcgcaagagccgccgtattcaaaaacgtagaatcatggacggttgttggaggaaatccggcaaaatttattaaaacaagaacagtcaataatcatgactgattatccaccttttccaataaagctttctccttttaggaaaaaactcttaaacaccatgtactctcccgtcaaccgaatttcgatcccgatatttccatattttctaaaaaattccgttttttcttacctgcctttttggaaccatagtgggcttaacttgctccgtaagcatgtataatacatcatcaattagtcctaaaacgatgactgtgggttctttttcttcttcggccttgagaagtcacatttactgtacgagatttatccaacgtggcaaatccgttcgcatcggttgcaatataaacatgctccgagggcactcacaatatctattctccgaatttctaactaatcgtaaaacctaccatgattaaaggctgcctcaggattgtgccgggagacacggttctgtcaggtatattgctattgaaaaacacggttgcagctgccgaatcctcgatcatttcttccgcaaaaataaaaaatggtgccactaaaaagatccggcagggtttcttaaaaaagatgtattggacaaacttcccttcttactcattttcatgaatccggagttcagtaaaaaattaaaaattctctcttttatcagcatcattggggttctggtcgctcacagttattttgtggaaaacaatgcctgggaaatcaatgcatttattcaagattggattggctgtcaaatcgtaagattttgtattcctttgttttttttcatctccggatacctgtttttccgagagacaaaagacggggggggaatacagaaaatactgaggaaaatgcgtacgagggcacactccctgatacttccctatttattatggaatctgttatttttcctttccattatttttcttcagctcatccccgacattggatcaaaaatcaattcggattttctgactctgcttcaaacaaaaagtatcccggaattatttcttttcattttctgggagccggccgctttccatttgtggtttcttcaatacctgattctttttgttctgttctgtcccatattttatgttttattccatagcaaatgggccactgtcgtcatatttctcatcctctgcgtaactataggaatttacggatgggggggagaaaacatgcagggattgcttgcttttttaatggggggttttatttcctataacggcatcaatattgaacggcaacagaacaaaaacgctatttttatcccttcggggctttatctcatatggtgcgctgtcaactgtttttatccggagtttcagttgccttttctgaatatgctcaggttgactcttggcgcttattcagtatggacgttatatgatttattttccgccaagaaaaactggttagataaaataatttcttgggctccttacacattttttatatacgtattccatgaaccgtggataaatatctataaaaaggcaattacactcttccttcctcccctgaaacttctttatttgtttggctacttcacaacgcctctcatcatcctcttggcaagtatcgtcatcgcccgcatattacagaaaaatacaggaaccgcatattctattttaacaggagggagacattaaaactcatgaatatttccgcgattattctgacttataatgaagaaattcacattcgcagatgcattgagaatcttctttccgttgcagaaaaaatattcgtcattgattgtttttccacagacgcaacgataaatatttgcaaagaatataaacaggttcatgttattcagcacgaatggcccggcaaccaagcagaacaattcaactgggcgttaaataactgtcctgttaaaacagaatggattctcagactggatgcagacgaatatttaatgccggaaagcctgcagaaattaaaaaaaattacggctgatcttactccagaggtaaatgccttatctttcatcctggtccgttattttttgggaaaacgcatcaaacacggtacaggcactatccgtttagtacggatgtttcgtacgggaaaagcccgctatgagaatcgcctcatggatgaacatatgctggttcaggaaggaataatcaaagatacggacatagaattcgccgacaacaatctcaataacctggaatggtggataaccaaacacttaaactacgcgaagagagaggcacgcatcttgctggatcaggaacatagagaatgcagccctaatcaggaactaagcaggcattccagaaataaacgcagacaaaaaaatatttatgcacgcattcctcttttctggcgctcttttttctacttttgttaccgttattttttaagactgggctttttggatgggaaagaaggctttttatggcatttcctccaaggatggtggtatagaactatcgttgacgaaaaaatttattcctttttaaaaaaacagaaataaatatcgcatcataatttttcggcattatttgctttagtcttgtttcgttgatctttccaatttttgatcggagcaatttgctaaatatcaatatctaaaacattttgaaaatcttgcgccaagactattcttgcataattccgcatttttttatcaatcttttgattagaaatcaggccgcccatctgccggatgaagtactaacgttccatcctgcttccggctcggcatgagagttattttatagttatgtcgtcagtggaaaaaacaatggacagcattcagcatcccttcacaaatatatttcaaatttaaagtacatcttaattaacatgaagcaaatcacttcactcagaggcctcgcgattattctgatcatccttttccacctcaatccggaacatttcccctacggctacttcggcgttgaagtgtttctggtgatttccggctacctgctcatgaaatccctccagaaacagcagatgcaaatccgtctcggggaatttgcccgtaaaaaagtcttaagactttttaccccggttgccgtcatcgtcccgctcactcttctggctggcatgttctttctggactatacggatctggcgacagccagctccacaggcggatatacgctgataggcgccgcaaacaggttcctggccgtcatccagtccgactatttcgcgcaggattcctccggcaatccgttccttcacatgtggtacctggcggtgacggcgcagatttaccttctgttcgcggggggatgcgtcctgtaccgttaccttcccaaacgggcggccgcctctcttttctggatcgccggcatcggggcctttctctgggcctattcctatcccattcacaacctgttgcaggaaatcggcctgcccgtctgggagcaggtccgccccacctcccattacatgacgctgccccgtttgtgggaggtttgcgcggggattttgttagcaatataccccccccctttaagttcaacacgttgcggaaacaacaagaaaaacgctctcctcttcatccttggaatgttatgcatcctcgtacctgccctttcccgcggaaaggatgtctccctctgctcggcggccgtagttttggggacatgcctggtgatccggtatgcggaatccggcaggctggcccactgcttcaacaataaacttctgctgtggattggaggaatctcgttctccctttacctggtgcatatgcccctcatcgcgttctatcattcgtggtttctccatgcccccggatggcccggaatgcttgctatcggagcggcgtccgcagtcctgggaggtctcctgtaccttgcagtagagaaaaagcgcatgaagatgaaatggtttatccccctgtaccttttcgcgttgcttctatgcgttgaaggaaggcagacggaaggattccggaactacatcaacaaggaaatcaactccatttccagcccccagctgcatggcgcatcggaaatcaaatctcctgaagccgcccggggatttgataaggaagccatcaaattcaataacaacatctttgccttcgtcagcagagccgatttcaagggaagtgcggaacccggcctgctgcagctgggttcccctgccgaagctccatccatagtcctgctgggggacagccacgcctctgcggccttttgcggattggacgcagcatgcagggaattggatatctccgggatttacgtttcttccgtcatttccccattctggaacagggaattgcccgcgctgccgtttgatgcaagctactattgcgacgagaaaaaaataaaggccctcatggcatggctgaacgtccacccggaaatcagccatgtggtgatagcccagcactggagcgcccgttacgacagtaaaaatgtaatggactggaagctgaagccgcttccctccggcgaacctgcctattcaaactccctccgtgcatttatctccgaactgcgggcgatgggcaagcaagtcatcctgctggcccccactccgctcatcaagcaaaatgacgtggccaaatacatcaggaacctcatacgcaggggggaaacgggaaaaggcctggaaagccttacctgtacgcggcaaaaatacagggaagatcatgccgccgtgcttcccatccttgaccgtcttgaacaggaagggctctgcaccgtcctgcgcatacttccctatataccggaagacaggccgttcaacgcctatgaacacggggaaattctgtacaaggatagcgaccacatgtccagcaaaggctccatcaaactcttccagcacctgaaaccccagttaaaggaagcgctacaaaaagaatccacggcatcatcaggtttacaaaagccatagccgtgaacacgtctgccgcagctccggcggggaaacatttaaataaaaccggcttttgtggaagctatagagttctctttggaaaaaaatgcccttgcatgatgaataatgcgtcaaatgtttaacactttttgtcatacattgaacatattttcatatttcttttctggtattgaagatacacttgctaaaaataaaaatattgttattatatttttcccctctaattatgcaacataaaaccattattgctacatgtgcggccatggccgctttttccggcatggctactgccgatatccagcttccactggatgttttaaacgccaataacggcggcaagacattctccgcccagctgggagcaggctacgctaccaaatacatcagccgcggtctggctttccagaattccgcaagtgatcatgtcattcccctggaagccgtcggcgcctatcaactgaacaatcaatattccctgataggcggattaaaatatcagtggctgacggataatggtctggaacacaatgattccggcatttgcgacgaaggctcggccatcttaggcgtcagccgcaaattcggaaaatccactatcgcggctctgagttaccagtttgtccacggcggtatccccggaagtttcaacatccacaatacaggcaacaactccggcttccctgctttcagccacaataggccggaagaacacagcttcgttctggacattcaccatgacttcggcaaagggctggaaaacttcttctgggactgccgcgtacaatatacgttccgctggatgactggctggtggttcaccaatactctggggtacaggtatgacgtcaacaaatccacctccgtcatcgtggcgggcacctggaacgccactgccggctattttgacagcaattccctgaacgccaatggaacccagggcatttccctgacggtttccacccctgtcaaggccacgaaagacctgaccgtgactccgttcgtgggtacggtctggctcggcaacggcggcctggcggccaaccaccgcggcgcttccgcccgtttcccttacagggagccctccaaggtttaccgcaatttcaccttcgtcgccggggtaggagttgcctacaccttctaacaatctgactatcattcactcaaccaacgcaagctccggcatgtgccatcaatcatgccggagcttttcttaactccccatgcccctgtccgccgttttccacacttcctccattcagaagcaagtggccgccctgagcgacgcattcgccatcgcaggagaattcctccattgcgacgtcattaacagcggccatatcaacatgaccttccgggccacctacaggaagccggacggcaccacccgccgctacatcttccagcgcgtgaacgatgccgtgttcccatgccccaaggatgtcatgcacaacgtggaaaaggtaaccaaccacatccgctggaaaatgctccgggtgctgaaaacgcccttccgccagacgctgaacctgtactccgcgcggggcggccgcaaatacctggaaattcccggttccggcttctggcgctgctacaactgcatagaaaacacccacacgttcgacgtggcggaccatccccgccaagcttacgaagcagcccgcgctttcggcgctttccaacagctcctgtgtgacatgaatccggaggacatccatgaaaccattccgttcttccaccatactcgcaggcgctttgaccatttggaaaaagccgcggcagcagactcccacggacggctgaatacctgccgcaaggagctggacttcatccgccgccgtgaacgttatgtggacgtgctgctggatctccaggaacggggggaactccccgtcagaatcgtccacaacgacacgaaaatcaacaacgtgatgctggacagggagacggacaaggctgtctgcgtcattgacctggacaccgtcatgcccgggagcgtcctgtacgacttcggagacatggtacgcaccatgacctcccctgcagcggaagatgaagaaaatctggataaaaccttcctgcgcatgcccatgttcgaggccgtcgtcaagggatacctggaggcctccagagaattcatcacgccgcaggaagtctccaaacttgctttttccggtctgcttatcacgctggaaacgggaatccgcttcctgacggactacctggaaggggacgtttatttcaaaacgaaaaaagaacggcacaacctgcaccgtgcccgcacccagctcaggctggtggaaagcatggaagagcaaatgcccgaaatggaagaatgcgtccggaaatgcttccagactgttaacggctgagagggcatgaacggcattaccccaattttatgatagtaccggaacgcgggctggtgctatactgcggggcatgttaaaaaatatttctcccctcatcagcccttccctgctgaaaattcttgcggaaatggggcatggcgacgaaatcgtcttttcagacgcccacttccccggccataccttcaaccctacggtgctgagggcggacggcctgggggcggatgccctgctggctgccgtcattcccctcttcgaactggatgcctacgcaacgcccgtcatcatgatggccccggttccgggggactctctggaccctgcggtggaagccaaataccgcaaggcgctgaactatgacggggaaattgagcaaatggagcgctacgctttttatgaacggtccaaaaaggcctatgccgtcgtcattaccggggaaacggccaaatacggcaacatcatcctgaaaaaaggcgttacccctctttcctgaccattgaccgccagacagaccttccatgcagtacgattttgacgaagtaattgagcgccgcggcaccggagccctgaaatatgaagcgctgcttccccgctggggccgggacgacctgattcccctgtgggtggcagacatggacttcaggacgcctcccttcatcatggaagctatccgccgccgctgcgagcacgaaatcctgggatataccgtcaagccccgcgctttctttgaagccatcagggactgggtggaccgacgccacgggtggaaggtgaacgcctcggaaataggcttcgctccgggcattgttcccggcatttccagcgccatccaatgctttacggaaccgggggacaaaatcatgatccagcctccggtgtaccacccctttgccatgatcatccgggaaaacggccgggaaatcgtcaacaatcccctcattctggaaaacggccgctaccgcatggacttcaaccacatgaaggaagccgtgcgtggttgccgcatgttcatcctgtgcaatccccacaaccccggaggccgcgtatggagtccggaggaattgcgctgcgtggctgaaatctgtacggcaaacggcacgctggtcgtttctgatgaaatccatgcggatctgacccttcccggccacaggcacaccgtattcgccactgtttccgaacacgcccgcatgaactccgtcacctacatggcgcccagcaagaccttcaacgtgcccggcctgggcagttcctacgtgatttgccagaatccggacctgttcgcgaaataccaagactttgtcagcggcagggagcttgcggaagggcacgttttcgcgtacgacgggctcatcagcgcctattcaggcccggaaggggaggaatggctggcccaggcgctggactacattcaggaaaacatccgcttcattgacgcggaactgcgtcgccgcatgccaaaaatcaaggccatcatgccggatgcctcctacctggtatttctggactgccgggaaatgaacctttcccagaaggaactggtggatttttttgtggacggagcgcgcctggctctcaacgacggttccatcttcggcaaggaaggggaaggcttcatgcgcctgaacgcgggttgtccccgctccatcctggaacgggcgctcagccagctggaggaagcctatgaaaaccgcggcttccggcaacaacaatcacaaaattaaagacacgcatcacgctccccggcaatggaattcatttccggaaccatgtattggggaaattttcccggggacatccagccccgccgtattttctcctgttgagtcccttgcggagaacgctgcggcgcggtggaaagggaatatccgcacaaccccttccgccgtttcgcccgcgcccccccttactctcccatcccatgctgaaaaacacgcccgggatgccgccatgactttgcttgcaaaacggcaggaaaggagtatcgtcccccgcatgtactatatcaccacggccattgactacaccaacggaccgccccacatcgggcacgcttatgaaaaagtcctggcggacgttctcgcgcgctggcaccggatgaagggggaggaagtctatttcctgaccggggtggaccagcatggacagaaagtgcagcagacggcggaaaagctgggcattacgccgcaggagcatgtcaacaatatcacggagcaattcctggcgttgtggaaccgcctgggcatcagcaatgacggatgggcctccacgacggatccgcgccacaaggcctgcgtgcagaaaatcctgacggacctgaaggacaaggggcagctttacaaaaaatcctacaagggattctactccgtgcgccaggaacagttcctgacggataaggaacgggacgcggaaggcaacttcggcccggaatggggggaagtggtggaactggaggaagaaaactggtatttccgcctgaccgaccatgtggaatggatgaagcagttcgtggaaaagagcagtgattttgtccttccttccttccgcaaggcggaagtgctcaacgccattgactttgactcggacctctgcatttcccgccccaagagccgcctttcctggggaatcgaattcccgttcgaccccgaattcgtcacctacgtctggtttgacgccctgatcaactacatttccttcgccggctacctggcggagccggacagcggcctgccggaattctccaaactctggcccgcggactgcgaagtcatcggcaaggatatcctggtgcccgcccacggcgtgtactggcccgccatgctgcatgccatgggcttttccgacgaggaaatgcccaccctgctcgtgcacggctggtggaacatcaacggggaaaaaatgtccaagtccatcggcaacgtggtggaccccaacctgctggcggaacaattcggcccggaacctgtgcgctattacctggtgcgggacatcaccaccgggaaggacgccaactttgatgcggaccgcctggtcatgctgtacaatacggagctggccaacgacctcggcaacctgtgcaaccgctccatcaacatgacgcgccgctattgcgactccgttatctccggcgcggaggcatatgatgacgaagcctccaaagccctgcgcgccaccatggaccaggccgtcaccctgttttccaaatacatggacgacaacatggcctccgatgccctggcggccctgaacgcccaggtttccgcctgtaacgcgtacattgagcagcagcagccctggcagctggccaaggatgaagcctccgccccgcgtctccgctgcgtgctgcgccatttgctggaatgctgcgcccaaacgggctatctcatcggctgcgtcctccctgacgcctccgcccgcattctgggccagctcaacgccggggacctgttccggggccttacgccggccgcgctggagtggggaatcctccccgcagggcaccgcatcaatgatcccgcccccgtttttccccgcattctttcggaagaggaaaaggccaaactggctgaaaaagcggccagggcggcaaaaaaacaaggctgattcccgtgaattcctccgcatccttcgtcaaatccctgctggcccaatgctgcctgggcggcatttgcgagtgggtggtctgccccggcgcgcgcaacatggcgctgcttcaggtgctggctgccgcggaggatctggtgaaatggactcactttgacgaacggtccgccgccttctttgcgctgggccgcattcaggatatggggctgcccgtggccgtggtcactacctccggaacggcagcggcggaactgctccccgccgtggtggaggcctactaccagcgccgccccctgctcctgctcacggcggaccgcccggcggcctgccggggttccgccgcaccccaagccatcgaacaggcggatctgttcggcatttacgcacccacaattgacctggaaacgccggaaagcctgccggaagacattctgcaagactgggattacgcctcccccctccatatcaacgtgtgcctgccggatccggaccctgcctggaaccccggcagctgcgacctttacccggcggaacctccggaggaaaacggattccggggctccctggcagaactggcccgggtcctgcgcttcaaatcgcgcgacgggctggtggtcatgatcggcggcctggaccccacggaacaagccccggcccggtggctggccaacgaactgaaagcccccgtggtggcggacgccacctccggactccgggaagagctggcccatctggctctgacggacgcagacgccctgctgagggaacacccgcccgccgtcctgctcagattaggggacgtgcccgtgggccgcttctggcgcgacctagaggacattccagccacggaagtcttctccgtcacccgcaccggcttctccgggctggcccgcccctcctccgtcgtaaccggagacctggaagccattctgcatgcgctgggggatatagataccgtgggcgacgtcaacggcctgcgcgccatgaacaaacgcaggaaagccctgatggaggaactgctcatcacctgcccggaaagcgaacaggccatggtgcgctccttctcctgctttgccgcggacggagactgcatttacctgggcaactccatgcccgtgcggtactggaacagcttcgcccagacgtccatccccacggaaaacgtccgcgccaaccggggagccaacggcattgacgggcaaatctccggttttttgggggtctccgcccggtgttcccgctcctgggctctcgtgggcgacctgaccgccatgtatgattccaatgccctggcactccttccccaactggacagggggacccgcgtcctcggcgtcatcaacaacggcggagggggcatcttccgcaccctcctgggagcagacggccagccggaaaccatgaggaagctgcttgtacaaccccacgcccattccttcaaggccattgcggaacaatggggaatgcgctacctgaccatccgcacggcggaggacttcgaccagcttgattccctggaggaaaacagccagacgcttgtagagctcatcccggacagggagcagacggaacagatccgcctccggctggccaacgcccaggtgtagacatgccttcaccaaaaacgaaaggaagccggccttttgcccggccatatcctgcgattctttccaaatggattgaaaatgccagataaaaataacatttcctgcatctaaccatagggaaatttctttcttgccagacgaagggaagagactacattaacggcgattcatgaaaaatgaatctccattgggacgacggcgggagccgtcaggaaatagatggggaatccggttagaatccggagcagttccgctactgtaattcttccacaggaagataagccagaataccagcctgatggatgcctatgcatatggcgggaaaccatttgatagaccatgttcaccagaatcatatccgctttggataaggagcgccccattcacggcgtcctctgttatttccggttccatgtctcaaccggactttcctgtttccggtatccctgaatgaacggaaccttcccatccggcggtttcgcaaccgccaatggcaagccttttttctggaaaccggtgcatgggctgtgcgtcaacacaaagtccatacgaaacatgatgagtaaaaaacaactgctattactgttgccggccctgtttgcggccatttcaacccttcctgcaaacgcggcccacatcctcacgggaggaggaaccggagctgtaaatgccagcggtacgggcatctccatgcaactgaaccagggctttacttctgatactgccctgcccggagccgtgaacctcgactccatacagctcaagctgacggacaaccggtttaccgcggacttcacatccggcagccttaccatggtggtattcaccaaaccggcgtcggacagcgcggactggacggtcgtcgggcaatcccgcacggaagaaaacctctccgtgaatatcggctcctacaccgacgttgaatttaccttcagcaacctccttctgaatacatcgcaggaatacgtcttcgccttcgtttccgacgccgccatgctgggcaggctgacaacaggcacgagccttcaggcagaagagggaattgactccccattcagcgtagacaacggatttgcctacgcctccatgcagtcaacagccttttacagcggggctcccgtcatactctactacaatacgggcaacgaaacgagcatgtacttccccaacatgatcgtcaccgtctccgaccccgaaagcgtccccgaaccggctccatgcctgcttgtcacactgtcgtgcgcgggcctgctcgtctcacgcagaaaaagataacctcgaatcgccaaactactggaatatccggtacggctacggccttctgcaattttcccaactgcctttcgtgcggagggaaaagccgtatcgggtcattgggcattccgcccatcctcaacgcaggctcagggccttcatctggcagagctggctgccccagccgtcttccgtacctcgacctcccttgcatagggctgcaaaccggtacggaacttcagtccccggtgtttcttatcatgtgggcacagcgtactttttcattcactctctcggcattcaagcgcggttgaaaaaacaggattgctttctgtccagaactccaacccggaataccagcagggaagaaccgtggccggacttatcgtaaaacaggtatcagaattcctccttctccatattctcattaatttgcagaaaaggatgttctccgtcggatcacggtcgcaatcctccaacgtccggggaacagcctcctcccgccgctctcccggcattttccccatcggcagaaagtccgccgggactgcggaaaccgcccagacgaatgatgcacaaatagccaaagccgcatgcaacagggcagtactatgaaacagcatgtccgccttaatattcatacggcaggaagcaccgggccgtcatccccttttttccgcctccagaggcatttgacgcagtctccccctcctgccattaaatacgttcctgcacggcatgaaaaaaaccgggcggaacatcacatccgcccggtttttacagccgtccggcgcaaacgccggaggcatgggttttccggcttcccgccgggaaccccgttaaaggtagctgcgcaccacgccggagacgcgttcacgagccgcggcaatgcgcttgcgcaattccagcgtgtaggcctccatatcccggatgggggactgggccacgccggaaatcatggccgcctgggtcaccgccgggcattcccattcaatgatgcggggatcaatgggcttgggaatcacgtagtcaatgccgaagctgagcggggcgcccccgtaaaggtcaatcacctcctgagggacgggttccttcgccaaatcagccagggcgcgggcggcggcgattttcatctgttcattgatgacggaggcgcgcacatccagggcggcacggaaaataaaggggaagcaggaaacattgttcacctggttgggccagtcggaacgtccggatcccatgatgcagtcaggccgcgcttttttggcatcctggtaagtgatttccgggtccggattcgcacaggcgaaaatgatgggggaaggagccatcagcttgaccatgtcctgcgtgagcaatcccttggtggaaagccccaggaacacgtccgctccggtgagggcctcctccagggaacagtcttccgactgggagaactgggctttcgtggcgtgcaggtcaatgcgcccggtatgaatcagccccttggagtcaaacatatagatatgttcgcggcgcactcccagcgtcatgtagaacttggcgcaggaaatgccggcggccccggccccgacgacgacgaccttcatatcctccagcttgcggcccgtcaactcggcggcgttcagaagggcggcgccggagatcaccgccgttccatgctggtcgtcatggaacacgggaatattcatctcctggcggaggcgttcctccaccatgaagcattccggagccttgatgtcctccagattgatggcgccgaaggtgggctccatggtcttgatcgtttcaatcagcttttccggctccttcacgttcagctcaatgtcaaaaacgtcaatgtccgcgaataccttgaacaaaacgcccttgccttccatcaccggcttggccgcatccgggccgatattgcccagccccagaacggcggtgccgttggtgatcacgcccaccagattggaacgcccggtatacagggcgctctgggaaggatcttcttgaatgcggagacagggttcggctacgcccggggaataggcaagcgtcaaatcccgttgtgaaaagcagggcttgcagggaagcgtttccaccttgccggggcggggctgggaatgatactgcaaggcgtctaatctaatatcggaactcatgattgtaatggaaaaacaaaaaagcgagccttgcttgcaccacataatcgccatgcattcaagcaaataatcaattaatcgcgtcacacgttccggcccctgaaaacctctttttacattgaaggaagcctccggatatgctaataggcagtcggataatcacctgtcatgtgaccatggaacatacgccttctctcccttccggatttaatatcaacggctatcttatccaatccctgaagcagacggattccctctgccatgtctattacgcttcggatgccgaccatgttccatacctgctccgcgaattctgtccccaggggctcgctgtgcgcgacccggaaagcggaaaactgcgctatccggaaaacacggatattgaacgggaagttcttccgctgaaaaatgatttcgaagcgcagttccgcacaggatccctgggggaaatccccgctctgggcaccctgtacctggtttatgccattcccggcggccatgccgccgcgcagccggcctccggcacggtcgtcccgccggcatcccgcttccagcgtgatcagcgtaccttgaccactcccggaaccggggcgacgcccgttcatgcgggcacccttcccccgccgcggaaaaagaagaactccgccggcatatggattctcatcctgctcctgctgggaggcgcatgcgggacctactatttcacccggaaccccgaggaaaaatccgcctctgcccaggagccggagcccccccaagccaacagggaaaagaaggaagacgccaaaccggaaaagaaagccgccctgcccgccgtgaaggaggaagccgcccccaaacaggaaaacgccgcgaacacctcctcatccggccctgcggagcagccggaaaagactccgccggccatttcctccggggaacggaatgaagatgccccgggagctttagaggaaaaatccgcagccgaccctgcacagcctgacgaaaacacttctgccccggcagatgacgctgcgaacggaaaacagccggaaccgcagcatcccgccaaccggaaggaatcacaggcggaacagaccgccgccaaacctgcgcccgtagtgcgtccgcgcgggaaagccgccaggcaaacgaccaatatgggggatgtgaacgcctatgtgaaaaaattcgccaagcccatgccgctgaaccagtggagaaaacaatacgcagagctgtacacgagctggttcggcaactccgaggaagtagccaaaggctggatcaccaccttcggccctctgggcttccgcgcccgcggcctggacgcctcctggccggacacgaacttccgcggcttcttccctaaaaccatgctggaccccaacggggaacccgtggcgaacctttacacggtcacccaggtgattgagggttcccctgccgaaaaatacgtcaaggaaggagacctgatcctgggcattgacggacacctcttcaaaacgtcgcaaagcctggacgtgctttacggcccttatcagcatcagaacaggcgcggcctggacatgcacgcgggccttctggtggacaaggcggaaggagccggaaaaatcaccctgaacctcattcccgcggaaagcgtggaaaaaatccagggcatccagcctctctggaaggaagtcttccgggaggaacaggctaaaaagcccgtttccctttccattccggtagagggcggccagcaggtgcgcctgcgcgtggatgacggcggcaacggcatcggcagcgacggcttcgaatggtcggatctgaggctggaaggccccggcggaaccgttccgctgaccaaagcccagcaatacaccgtgggttacggagaagccaggtacgacgccaaaagcaaaatatggcaggcgcacgccgtctcttccctggtctttgatatccccaagggtgactggaaccttaaaggaacgggaacccccaggtggtccgcctccgtgggcgtgaccgtacaggtgggcggctcctccgccctgccggacgcagtgaagaaatatgtgaaaaacgtcaccttcaaaatcccccagcttggttcctatgccctcggcttccccaaaaattgcgccaagagcaaggcggtagtccacatgatgagcgaatggctggcggcccagcagcgcgaggacggctcttgggaacgcccgggcggctactgcggcaaccattatgatacaggctgggccggcctggccctgatggccacgggcaaccctaagtatgaccccgccattaaaaaagcggctcagtacatcgccttctccggctcccaatgctggtgggccgtcccccaggcttccgcgggcatcttcctgtgcgaatactggctgcgctaccgggacaactccgtgcttccggccatccgcaacagcgtgcagcgcatgaaaaacgaagttctttatggggacttcgtcaccggccacggcattcacccgggctaccggggaacaggcgtcagcatcggaggttcccacatgtgcctgttcctggcgctggccagcaaaactccggcgcgcacggaagacggcgtgctggacaaaatgatggaccatgcccagtccatctgccccaccggcatggggccctatggccgcatgacggaaaccttcacctttgaacccgaccgtgaatgcgggggaacctactccggccgtcacggcccgtactacatcgcctccctcatctgcggcggaccggagctgtacacaaaaaacagccgcatcatgtatggggaaggccccatcggcggctgtgaccagggccactcctccgagacgctctccatcatgtgggctctccccgcctactggcgaaccaatccggaagcatattacaaaaacatggaggctttccggtggaaactgacgctgctgcgcccctttgacggcggcatgatgcagaaccccaaccgcctggaactaatgacggcggactccgtcatcggcacctacatccgcaccagcatctggatcacggccctctgcgcggaacgccagaatctggcaattacgggcaagcctgaattccaggccaaaacgttccggaaggtgccccccatcattgacacggaatcccgcttcctgaacacctacgtgcgcaactggtccatggtaaacgctgcgcttggaaccaaggcccccgcctccctgaaatccgccatccgggaattgaaaaatattccggtggaacagggctgccgctttaagcttatcaatgtcgtcaacaaccgagccctccccatcgccaaggccatcatggaaattcccggggtggaccagctcaccagggctacctgcgcggaaatgattctgggcatggatgtgcgcattttctttgaacccaagctcaacgacggtaacccccagcccggggaatattctctgaacgtggacgtccagcagcctctgggcggccgcgccctggggcttcaccgcgacaaggagctggaagggaaagccaactccgcctacaaatatgattttgccggcacggtgcaattcagcgacacgaccaccttctcccccatggaaaccatttcctggacgcccaattccaaattcggcggccaatggaacgtctactcctacaagaaggaactcagcggcccaacccagccgggcgtgcaaaaaatgaacgccaaaatcaaatggcgcgtcaatgacctggaggtggaatacgaccgccccattgccgtgggcggctttgaagtgggatgtgcagaaaaggccctctcagtcaccaactgcaaccatctgtgggtgccgggcatcctgatccgggatcacggcaactggggctgctccttccatctgccggacggaacctacatttccgcggcctctcagggcaaccagatagaggtgtacgacaaaacggataaaaagaaggaaaaaacctgggtttccccgaatgactcctgcctgactcagggttcccgctgcctgttccgcgtttccacggactggcacggcctggaatgccgcgtgcgtgaactgaaactgctgggaagttccacggaggaagtggaggactacaagctgaaagcctccacaggaggccgtgtggacacggccaaactgacggaccgggacgccactaccgttgaggaactggacgcttcccccacggaagacgagcccctggtgctggaactcaccctgaaatcccctgccgccctgcgcgccgtggacatcaagattgaaaagggccacaaccgcctcatcattgaggcctacaagggaggcaagtggatccccatccactggggttccctgggagcctccaccgccggcgtcagcgatgcgcagaaagccatgtacgccaatgaaccggaagtgctgcgcatgctccagcttccgggcaacggattcatcaaatgcatgcgaacatttgaccccgtcaccaccaacaggctgcgcgtcaaactcttccagaagggcggaaaagtccgccttgcggaactgcacgtgtacaaagcgaacgccgccaaaaatatggctctccgctcttaagctgcggccgcccgcagctggaaatgacaaaaagcctttgtgataagagaatcccggcaggagcgccaatcgcagcgcccctgccgggaaaacagagcaatcccttttagggacggagggaatttccttctccatgccgaggccgcctgccaattttttgtctattgacactcagcggcgcccgccctatattttctcatgatgttcatcagaacggcactcctttttcctcttctctttctctcactttcagcatcttccgtcatggcagcgactccctgggcatccgacaggaactgggaactcgtttttgaagacgactttgacggctcatctctgaacgaacataactggagccgcattgattacgtaggctataacgccccggactggcgcaagtaccaatcccgggacgaaagccttgtggaattccgggaaaaggacggcaactccgccatgaccttgtggggaaaatacggggactacactactcaaaccaaccagaccgcaccggccaaaacatacgcctgcggaggggtatattccctgaaaaccttctccttccaatatggctacgtagaagtccgcgccagattcgattgcgtgcagggcgtctggccggccatctggatgatgcccaaatccgacagcatcggctggcctgtcggaggggaaattgacatcatggaacacctgaattacgaaggccgtgtttaccagacaatccactggtcgcaaaacggcgttcccaatcaggataaatcccagggggtcacccccggttggaacgatggtgctgaaaaagcaaactggcatacctacgggatggaatggacggaagaaggcatcaccttttatgtggatggaaaagcaaccggttcattcaaaaagcccaataacgcaaactggccctttgacaaggacggaaacgaattctacctgatcatcgaccagcagattggaggcaactgggtggaaaatgcaggagttaataagggaatcgaccagaatacgctggccaattccggagccgcattcgacatcgattatgtcaaagtctattcctcaagcatctacaaccacctcgttccggaacccgctgtggcttctctgggcctgtttggagcagccttgctggcggctcgccgcaaaagaatctgatcgcccacacaccttttccttttgttcctccctgccgcgggaataaatcttccgcgccgtctccggttgcttccgggctgcttccgtaaagtttcatcatcgggcggagtatgaaaagcaaagccgcctcatgccacgcgtatttcgcatcattcgaatcttctctatatataaaagcgtcacttaatgacgatgtccatcagtttcttgtaactgtccactacgtcatagaccacatttccattgctgatagccctgaaatgctcccgcgcgcagtgaatcttggactgctcaatcagacggagctgcatagaggacatagagcctttggtttccgccacgaagtaaatgtgcttcacagtgccttcgtagaatgcaatcgcccagtccggattatacttaccaacaggagtggaaatgtagaatccatccggcaacttcacatatactgcgacatccttattggtgtcgaggtcggttgcaaagtcacgctcgttggtagagtcgtaaacgatatggtcatacaggtggcggttcgccttcattgcgttcaagcccagcttgcccttgatggtaggctcggtgaagatgtctgtgccataacgctcatccagaacatcgtaggtaatatgctcaatgacggcggttgctttttcgtcattgataagggcagcagccttgatgatgaattcttccgggttgtccttgaactgattgaacacagacggctgaataccctttagaatggcaatgacagccttgcgggtgagtccagtttcatctaccaatttgccgaccaggtcatacttcacattactgcttgcgtgaatggttgcaccgtaagttccggattcctctttcacaaaggatgcaccgctttccagctcagccttggacttaatctgctccatagcgcccgtttctaccttaaagtaaatcttagatacacgaagttttctatccaacgcatcaatggacttacgcaccagttcatctgtatcgaaatcaaccacataaacgctcttggcattgattctgttccacaatgccttgaactccggcattgcgagtttgtcctcgtccacggtgagttccacattattgctgcgagcgttttcgggttgcattgccttggcgtcatagatggagtcgatgataccgataacgctttcggcagaacctgcaacctcatccgtcagcttgatttcgccatttgccttatcttcgtaatacttgtcggtcagcgagccttgcttgtcaatgtagccttccatacgcatacccagccaaatttctctggcaacatcctcagtgataacatcggtgctgccctgggcatcggtaatagtcctgcccataaagagttcaggcgtaactgcctttggacggtttgcaacggcatcagcaagttcggactgaagtccctttgcgaaactgtcatagctttcgctggcgataacggtcaacacattgatgttgtgaacatcgtttccgagaacgccggaatccatacgctcaccgtcctggtttacgcacagacgcagaccacgaccaacttcctggcgttttctcacatcagagccggactgtttcagcgtacagatctggaatacattcgggttatcccaaccttcacgcagagcggagtgggagaagatgaaacgcacaggcgaacgctccggattgcggtcaaggagcagttccttgtttttcataatcaaatcgtaagcgtcaatatcgtccgaggtggtttccttctttgccaacttacagtctatcatcttgcctttcttgtccacggagaagtaacctgcgtgggttgcggaaggcttgatggatttcagatacttaatgtattcgtcctcgccgatggcgagctggaggttttcgataatgtccgcgtattcctcttcaaacatttctgcgtagataccgttaccgggctgtccggctgcatcgtacaccttgtacttggcaacctcgtcaatgaagaacagggacagcaccttgatgcccttatagaacaactggcgctcacgctgaatgtgagagaggatcgtttcacgaatctgaatacggcgaagctggttttcatccaccttgccgataacatcgcccgcgtacagcttgatgccgttgaggaactcaatggagtcgtctctgccgtcaatgtgcttaacgacaaagttattcttgtattcctccatgtgacctgaatgatcgtaaagattaaatccgatgcccacggtgcggctgactttacggatatcgcttgcgcccttcatatcgaactgaatggtagcggtagggtccttcttggaaaggttgatgctttccagataaacatagctttcggtggcggtgctgcccgtttccgtaatacccttgacggctatcttcttaaccaggcgcttgttatacgcctccatcgcgtccagacggtaaatcatgttgtaaatgctgtctgatttgtgggtcgcggagtagcggagggtaaacagcgggcaaaattccttcaaacgctccctggtctgcttgccttcaacggactgcggttcgtcaataatcagaatcgggttagtcttggcaatcatatcaatcggacgacgggaacggaactcgtccagtttcatgtaaattcttctgacatccttgcccctggcgttgaatgcctgggagttgataatcatgacattaatggaactgtcggaggcgaagcggtctatctccgtcagcagggcggagttataaacgaaaaatcgtactttcttgccgtattcctcagcaaaatgctcctgggtcatctggaaagatttatagacaccctcgcggatagccacgctggggacaaccacaatgaatttgctccagccgtagtgcttgttcagttcgtacatggtcttgatataggtgtaagtcttgccgacacctgtttccatctcgattgtcagattgaatctgccctccaacttaggagagggcgcaatctgattgtttttttggatttcctgtatatgtttcaggataaccgggtcggaaagttccggcaccagtttctggttgctccaacctgtaaagtttttgtccccatcaatgccaagctgataagtaccgttacctctgtccatcatgtaggtagcagtcaaatacggctgacctgcaaaaacatccactacagcctttgctgcctccgcctgggaatttttggtgcttaaattgcagcttcattcctgttcacctccggtatcgtgcgtaaaacagcagtggaaaaatgcgatagattcgccaaatactgtttagccaatttattttccatttctgtccctccttaaataacttttactcttgtatccggcgctaacagcttaaatacctcagttacattgattttggcggggctggactgaaaacaggaatcacgaaacacggcgcagaggggcttcatcccggctatgccgcgcataacagactccggcactctgtccgcaaagcaagcaagcagcgggacgcgcgtgtgtgtgtgtgtgtgtgtgggggggggggggggggtatgtgactgattatcaatatcattctcataaaaaaccatgccgtctttgcagccgcgatattcttcagcgtccattccgtaggcatacacctccaccccatctatctggaacaccgtcattctttctgaaagcggcaacccccattccagcaggcagccgaacagcaaatcaaggtcagtacggtcttccttaatgttggattccaagccggagagcatcccttgctcatactcggcaggggcatagtacacatccttcatattgctggaatccagcttgagcacgcggaaaccagtatcaaaacttgcacctgaatttttctgttgctgcttttttagcagctctacggatgcgttctttaccaatttcgcagatgttggaatatccagcagagtacgcatctgttcccactttgcacttttcatcgatttgtaccataataaatttttctcttaccctgggtagacgcgttaagctgaaggcaagcatctgctgtcgttgctgttccagagaaaaagtccaataccgtgtaattatcacccatgtaggaaagaagtttcttcataagggctgtcggctttacggtatcaaatcccataggtgtttccataatagaattaaactcgtctttgcccgtttgtgctgtgcctacagcatcggcaaggagtaaagaccaaaatggcttatactgacgtttgtctaactcatcttcaggataaacagctttttttacaataccatcaacaatctcgacttttccttctttttcaagctgacgagccgtatcctctccaatttgccacctttttccgtcacgagggtactgtccaagaatctggaatttcatggacggtctgctataatctccagaatcagatttttcgatgatttcgaatcggcaaggaccaaactttccacgatgcggatatgaaaggtttccctctatctcttcaagcgtaaatcctgcaactttgtttttgcatttaccatagacaagaattggctctgtttttttctgcaaaccaaatcttgcggaacctgcattgattggttgggtagtggcctcccaaacgaggtcaccaaaataatttttttctccaaaaacttcatcgcagatatcacgtatgttagcatactctctttcgtcaatggaaatgaagattacaccatcatcggacaaaagattgcgagccaacagcaggcgtgagtacatcatactacaccaagttgagtggaaacgaggattggaagcgttgttttccttaaagagatgatttccttcctcatcaacgctgccggattcaatgctgtactcatccttatccattctgtaattatcgggatacataaatgtgtcactgcctgtattatacggagggtcaatgtagatgactttgatagcaccgaggtagctttcctgcagaagttttagaacttccaggttgtcgccctcaatgtagaggttctcagtggtatcccaattcacgctgtcctctttgcaaggacgcagggttttgcggataggcttgttggcttccacaatagccgcctttttgccgacccaggtgaattcgtaagcctcgtcaccctccaggacatcgccggaaagcatctgacggagcaggtcaaagttgacggctttcttcatcttgccatcttcgcctacagtttccgtgatgcagttggggaacaacgcacctatcttttcaatgttttgagccgtcatatcaacggactccattctcattttttccattacagaatttcctcccattctttgctgagtttcttgagcagggcattcagttccatctgcttgttgagctgtttttctcttttgattttcttttgcaatttcgcaatctgcgtctgaagagcctggcgtttctcatccctcgctatggactccttgaggctttccccggcttcggaggcagcgagggcgtctccggcaatctgacggacaaagttttcatacacgctgtcaacggacaaaccttccaatttcaacggaagtgcgtcctcgtccatccattcagtggaatagtagcggttaaccttgaaggcagtgttgccgtaggattcctccttatagccgataacggctttatacttgccttcgtattccaggatgaagagaatgtggtagggtatttctttgtccatctgccgcaagaagctgtcatccagtatctgactgttcagcttgacctcaaagacctccagctccgttacggcggtgccggaagcgaggttggtggtggagtctgcgattttattgcgccagcagattgtttttatttggtctgtgaatacctttttcagagccggggttacggcaaggttgtcatagaatttctgtttcgggattcgtttattgaactccgttgtttttggtaatccgagcatcgcctgatctcctttacttcaccgccagaaagcatatcagttcaaagtcgtccagtccagacacggcagacatcagggcggaagtgccgcctgcggagaacaggctgtcgatatcgctttcttccttggcgtcaataatggagcggatggcttcgcttaacagttcagagagttctgccatgttcctgccgtcatcggtttccgcattgaattgacggcagaggtcatggacgggttcgttcttgccacggcaaaggaggcgcacatcgtccagcagtttcttcgggttcagataatcaccgatgatttcaccgtccataccgatataaaccatgtagaacggatggatgcggttctgattgtcgatattgacgctcttattgatattcttcagtacgaagatgacgcctttcggcaattcctcagcagcaggaacaacagcgtgaagaccacgaggcttgttatccatattgccgtgggtcttcacatactcaagcaggtcaaggcggaattcattcaatcccaagtccataatggagatgccctcggacatgtcctcaatatcgaccacttcctcctggagtcgtttaagctgctgttttctgtattccaggtcgcccttttcctcctcgttgatgaggtcatcgtcacctgtggaggtcatcaccgtaattttcatgcgggtttcgactctcgatctcagattgatgtaatcatcaagcgtgaggtcgggccagaagtttacaagctgaatgtaattgttgcggctgccgatacggtcgatacgcccgaaacgctggatgatgcgtacagggttccagtgaatgtcgtagtttatcagataatcgcagtcctgcaggttctgaccttcggagatacagtcggtagcaatcaggatatcgatttccgccttgctgccgggcatcagaacattccgtcccttggaaaccggggagaagcaggtcagaacattgttgagggttgccttaaagcctttgatggttgtcttgccatcaatgctgcccgtgataacggcagtattcagtccgtatttcttctttacataggcgctgacattctcatagaggtattctgccgtgtcggagaatgcggagaaaatgatcaccttcttattatcggggttaatcggattctcaatcttgtgggacagcagagataggagatcctgcagcttgccgtcatgctccggcgtaatgtctgccaccataagggtcagcagttccaacacttctgcgtcctgctgaagttcggtgcgccaggttttgtagtccatatcggcaaggtcgatttttaccttcctgcccacggagaagtaatcggtgttgccatcgtccatgtcgaactcagactcctgagcttcgtacatggcgatgtcagcggtgccgtatttctcaaagcggttgattgcctcaatggtgctgtcgatgagtcctttgatacgggtaagtgtcagttggaaagaataaacggaactttccagccgtttcaaaaggttgatgctcatcaaacggcgaataccttgttcacgtccgtcctgggtgaggttttcccccttgttgtgagtcaattccgcatatttttgaatcttacttggaaagatgtaatgggatggagtgtagatagacagacacaacagcatcagttgggcataaatttcatcatagttgatagcacgcttcaaatcggtgaggcatggccgcctggaaactggcggcagcctttccgggaactttccgatttctgcggagttgtaatatttttcaatgtgctttctggatctggcgatggtaacgctgtccagaacttcaaagaagtcaaaatcaagggtgcggagcagcgcgtctgtggagcgttcctctgcggggagtttaccccaggcattgaacgccttttgcgcctgcttgaaaatatcctcaatagatttcctggtgttcagcttggaattgatattctcggagtcgccctcataggcaatggcaagctgattttttaagtccacaaagcggttgttgaccggagtagcggaaagcatcagtactttggtttttacgccggagcggataaccttgtccatcaactttacatagcggttctccacagtgttgctgtgtgtgccgatgccgtttcggaagttgtggctttcatcaataacaaccaggtcatagttaccccaattcaggcggtccaggtcaagaccgttggaagtgccgtgactacgagaaaggtctgtgtggaacagaacatcgtaattcaagcggtcagaggcaatggggttattcacatagttatctttatatgtattccagttctcggccagttttttcgggcaaagaacaagaacggacctgtttctattttcatagtatttcacaacagccaacgctgtgaatgttttgccaagaccaacgctgtctgccaaaatgcagccgttgtatttttccagtttgttgatgatggcgagaacggcatcacgctggaagtcatacagcatggaccaaatcttgctctccttgaatccggtagcctcattcggcagttcatcctcggaaatatcatccaggaattcactgaatacatggtacagagtcatgaagtagatgaattccggagcgttctcgttataggcactactgatgttttcgatgatttcctcggtaacatcctgcatcttggacttgtcgttccacaaggactcaaacaactgcatatactgtgtggagaacggcgcctccatgcggtttaccatgttgtagctgttgttaccacgctcacagccaatgtcaacggtagtgaaaccgcccaacggcatataggcaacctgctccgcaggagcgttaatcgtcataaagccacccatgttttcgcctgtgatattggatttgaaggttgccttcttacgaatccaatcagcacattctcttgcgatggctttctgtgtcatttcgttgcggagcttgatttcgaattccgtaccgtacaaactggtctcacgggagagccttgggatatagaattcacgctttgccctggaagccttctctgtagtaaaagtcggagaggtaaaaatgaagcggaactcatcaacagaatcaagctgctttttcagttctttataggcatacatagagaagcaggcggccgctacagaaaccctgctgcccctggaaatggtagtgagcatatcatctcttacaatctcccgtatattgtcataaattttcattgattgactttctttctgggatgatatcatccttgacgttcacatcaatactccagaactggagatgaaggcagatgttctccacctccgcccttttcttccagacggcacagggcctccgcacggcggaggcaggaatcccatagggaagccttttccggaaacgggaaacacagggagtcgctcagcttttccacccgtttgaaagaatcctcccggtcataggcgttcaaaccttccagacgggaagccagcccatccagccagggaagagggtcatggcaaatcaggggaagatcgcatccggcccgcagggacaggaaagcggcgtcatccggtgaatactgcgccgtaatcgcccccatgcacaaatcatccgtaaacaccacgccccggaaaccgaggcggtcgcgcagaagccccctgatcacccgttcggacaaggtggcgggataatcgggatcaatctgaggcagcatgatatgggcggacataatggaggacaatgccggacacagagccagaaaaggcagcaaatccgtcttgaacagctcccgttcatccaggtcaaccacgggaaggctgaaatggggatccgccagggcacggcccatgccgggaaaatgtttgccgcagctctgcacgccgccccggcgcaggttggaggcataaacgccgccgcgtgaaatgacgtcctgggcattatctccccagcagcggccgggaagcgcgttggccgcggacggatcatggcagatatccagcaccggggcaaaattcaggttcacccccaggtagcggagagccagagccgtcaccgcgcccagttccactatgccgccaactgaaccgagccgggccagcgaagccggggagggcaaattcaggcccagggaagcggtgcgcaccacacggcccccctcctggtccacggcaatgacaggatggtggaggcaaagtttccgcagcgactccgtcagcccgcgcacctgctccacggaatcaatattcctggaaaacagaatgaaacccgccggctgccaacgccggatggcagcctcttcctccgcgcccacttcatggccgcttatgccgatcagggccgggagcatgaacggaaaaggattaacggcccaacagggaagtcctggtgtacagcgggtaaacgggaatgccgcgttcctcaatcgcctggcggccgccttcctcgcggtccagcaacaccagggcggcggcaaccctgcccccttccgcctcaatggcgtcaatagccttcagcgtggagcctcctgtcgtgatgacgtcatccaccacgaccacggtatccccggcctggaaattgccttcaatgcggcggccgcgtccatggtccttcggctccttgcgcacggtgaacacctgaagcttcttttccgctccttccagagcgctggtcatgccgacggccagggaaatagggtccgcccccatggtcatgccgccgatggccgccacctccgggaaacggggcaaaatatcctctttcaccagcttccagcccagagcgcccaccagggtggctcctacggggtccagggctgtcatgcggcaatccacatacaagtcggacaccttgccggaagccagtgtaaaagttcccgtgcgcacggatttttccaaaagaatgcttttaagaagatcgtattgttcgctcatgaaaatagggatgaatgaaatggttcgccgtgtataacagatacccccggaataagcaacggataacagcatgcaaatcttgacaaaaaggaggacaggccccataacctgcctgtcattttcccgttcccatgaaatccggcatactggcgttagtttctatcagctccgctcttgtttcctgcacatcgtacgagaggcccccgctgtttgaccaaatcaccggaaaaattcagggaatgtccagacgggacgattatctgtccggagtgggcaccacctcaggcgtcaacacggacctgcctccggaagcccgtctgggccagggatattgggacctgccggcgggcacccagggggaaaagcacatcatcattgacctcaagcagcagaaagtcttctactacgtgggaaccacgctcgtgggcgtttcccccatgtcttccggcaaggaaggctacggcactcccaggggaacatacaaaatcatccagaaagacgccaactacaaatccggcacatacggcgttctgcgcagcaaatccaccggagccgtcgtcaacggggattacaacgccagggctggcggagcgccggcaggaacctacttcgaccccgcccccatgccctactggatgcggattacgggaggctacggcatgcatgtgggttttgtcaccggatatccggtcagccacggctgcgtgcgcctgccggaggacatggccaagacattctttgaacacactcccatcggcaccaaggtcaccatccgttagccgtttcctgcgaggcatcgcgccgcagaaatgccacactttccggaaaccggcgtgtttcgtattcccgccgtccggaagcgttccgtgctgataactgctcccgtttcatggcgcagcttcctcactccggcattgacaaacggctccgaacctttttgaatatacgggatctttgacctcttgattagtcatgacaatccctcttccccctgccctgccgccccatttcaacataggcggctataaaatcacggcgcttgtagaaagcggtccggactatcatctgtaccaggctctttccccggaaggccatgccgtcctgatacgcgaattctgccccgggggcctcgttacgcgtgacctggccagcggagaactggctgtctttccggaaaatgaatcccaattcgcccaggcccgggaagcttttgaaacccaatacgcagcaaatgcagaaagcaagctgaggggattcggcaccgtgctcttcctttacccgctttctccggcgcagccccagccggctgtagcgcatgcccaggctctccatcccgccaaaaaaccgcagcaaccgcaactgcggaaacccgtagtcggcgccaccatccccggaacgccgctgccgcgggtaaagcactccggagggttcccggtcatcacggtcattgtgaccgggatgctcgccctcttcggatttctgggctaccagatactcaaggataaagaagaacccgtcgctaaagccgttaccgtgcccgtaccggctccgcccaagcccaaatccaagcccgctccgccaaaaccggagcccgtggtagtcgcacctgaaccggaacccgtggtggtcgctcccgaaccggaaccggagcctgaaccggaaccgcctgctcccgacctttccccctccccggaagtcattgccatggaaaaggctttacgggaggaagctatcgcgtccaaggggaaattttctgaaaaactgttgaacaaatatccctattacgcggaagcctacgtacgggattacgtaaaaaaacgcggaggcagtttttctccggattttgaaaaatggctgaaaaacacgaaaaacaatcgtgaggtcttcgccatgtttttcccgccggatcccagcgtcgccaccaatgtggctttcatgattgatgaactggggctggaaacgacggaaaaatatgaccagctcgttctggcgttcgcagtaggacgccgcgaattcggcatgggggccttcgaccttacccagcagggccgctacattgatgccctgggcaagctgaatgacctgagatcctctggagtcatgcctccgccagcggacctgtattgcgccggaaaaccgcccgtcaactggtatggtaacgccccccgcaccgtggatgaggaatgctacaaaaaggtggaagcctatctggaccgcaaaaaaatcaccccaaagcaggcctggctcaggaaataccccaccgtctcggaaatcggggactccgccattacggaagacaacctggccggctttctgcacgaatacatgtaccgccacggccagctgaggcgcaaaagggaccccttccccactccggtggaattcttttcctaccttgtggataaatatgaacattgcggtgatttgcgcgacgtggaccgcaagcgtgtggaatggaccggcgtttccctggaaggaacgccctggccggccatgatggccctttcggaaacgcgacctctgcgtgagtgcgacagcgtgtgggaacgctacatgggccagcggggcccgacccgcctgtggctgtacggcccctaccgggcggatgacgacaaggaaccgcccatcctgttcagctttgacccggatccggaatggtccagggaatccaacgaacgcaagcttcatgaaggcggtgtgtgcggcaccatgtcccttatctcccgcaattcccagattgcgcgcggcattcccgccgcccccgccgggcagcccggccacggcaatctgatgaccacccatttcaacggtaacggctgctggctgagcgtggggcaaagcgtggacaccctgaaagccaccacgggattctggtacttccgggattccaacgcaccgcgcaccggcaatgcggaataccagtccggactggccctgtccatgaacatcgactatgaaaagttcatcgacagccgcttcgccatgaacatttacaaactggcggccatcggctccaccacggaagagacggccgacccttccgtcacgctccccaaggaattcacgcagaccgccatgaggaccgtgctcaaagccaacccgttttatacggaagcctggtacatgctcttcaagcaggaacctcaggacctcatgggagccaccaagatggtggatgaagtaagggaggccctgccggacggcatgggcatcagaaaactctggaaaacgcgcaaatacgttccctctgtaggccgtggcgacaagaacggcaaggaaatgcttgccagccacgccaaggaatacgtcaatgtgctctgctccgtaattctggaaaatgccttgaaacaggaatatgactataagaccttccagtgggccgaactcatgtcctggctcaagtctgaatccaagcgcaactcctacccggagcctcaggccgcgtatcagatagcgtatgccaaggcccaaggcacagacaggctcaaaagaaccgtagacaggggattcaagaaagccctcaacttctaccgggacgacaacaacgccctgaaggagcctaaggatgtggatcaggaggaaatgtccttttctctggacgccctgtgccaggccctgcccaaggaagaactggtcccctggatgaaaaacatgctggacacctgtccggacgggttcaaatacaagcccaaaaacaagaaggaaacgaaaatccacccattctacagcgccctgacgaaaaactacatgtctctggctgacgattcggagaaatcccgcgtcaagtcggaaatgaaagaggcttccgacagaattctggagctttcccaggacaagaaaggcgatgggaatgggtcctccggacgccgccggagacgctgattccccgcttccgtgcacctctacgtccacattcccttctgccaccgtatttgcccgtactgcgctttcttcaagcacacgccggcctccacggacatgaaatcattcatccgagctctgggcagggaggcggaatcccgcgcaaccgctctggccacgaaccgcgaaggggaaacggccacgctttactttggcgggggaacgccctccatgctctcggacacgcatctggggcgtctcatggaaaccctggaccgtctcgtgcccgtggacaaactggacgaattctcctttgaggccaaccccgccacctttacggaaaaaaaagtgcgcttctggcgcagcctgggcatgacacgcgtctccctgggtgtgcaatccctggattccggcatcctgcatctgctggggcgcgaacataccccggcccaggctctgcactccgtggaaatgctgaaaaatgcgggaatggcccatatcaacatggatctcatgttcgccattccagggcaaaccctctccatatgggaagccaccctgaaggaagctatcagcgccggaacggaccatatctccgcctacaacctcacctatgaagaagacacggaattcttccggagcctgctgcggggggagaaaaggcaggatccggacgaagacgcatccttttttgaactggcggaacacatgctggaggcggcaggcatgcgccactatgaaacctccaactacgcccgggagggctgcctctccccccacaacatggcctactggaagggagaggactatgtaggcatagggcctggcgcggtcagcaccatcaacggcatacggtactccaacacgcgggatacggacgcctacatacgcagcacgctggaaaacggcctccccctttccgaacaggaacccgtcaccgaggaagactaccgtctggaacgcattgccctgatgctccggacggatgaagggctgccgctgaaatacatcctgccggaatcccgccccctgctgggacaataccgggaactgggcctggcggacatttcaccggaacaaagactcatcctgaaagggcgcggccgcctgctcgtggacgccatcgcggcggaactgtgctgaatggcattattttcctaacttaatatcaataagttggaaataaattagaaaaacgattaaaattaatttcttgacatttttcaatttttatctcccattattccataaatagacagatatgttccatgcatccgctgttcaacatttcctctgtttctttgctggcaggacttcttttcctgttgcaggcctcctttaaccacgcatggggaagtagtaagccgccggcatcaccacaggagccccaaacgttcatcctgcccctttacctgaaatccacgcctctttctgaaaaaaggcaggtcttccggaaatccctatccgcctttccttttgttaaaaagaatccgagaatccatcaatttgtccgggaatatccggctttgacctttgacgaaggcgtatctcttttcgttcaacggaccgccatgggacaaacacctggtgatgtttgtgcccgcctcaatgaattgacagccctgatgcagcataaaaatatgcaatcagggcaacgccgctcctgccttaccggattttttgaaaatgcctttctccggacgtactccgcccggtactcccccttggatatggaagctttatcgctttgcgccctgatggaactggaaatggaggaaggatgcccattgatccttcggtctcgcattttaaaaatttgggaaagcgcagctatatccatggaaaaaggaaccggcatgcaaagaaaactggcagctcttttatttataaggacactgcggcatggaaaagaagatccttatttaatggcccgttgcggataccggttagccaatctttatatacgcatgaatgaaccgcaaaaagcccagtgggcagcatcctttattccgcctattcggggcatggaaggcgcccgtgctttaatccggaaatggacaacacccgcttccaacaaaaaaaagcgtaaaaaataatctcattcaacctgcctgatcatcatatggacaacgcattcatctcccgatgttttcttcaaatgcctgttttgcttgcaattgccggcattgctgcactatctgccctcctcgcaaaaggacaacaaatttatgaagggaagacaacattggaatattccctgtctccggttgaagtggtagccaatctttcccagcttgcagataaattgaaacaatgctgcgccggagaagtgaaaatcccaaatacaacgaaagtcactgacccaaaatctccctctactattccttataatggaaaaatttccctcaaggattttaaggatgaacgtattagccaacctactactgttgcgtggctttcattggtttccgacgatgggtgcgacatttcttataccacagggaacggagaaaaaacagactggttaaaagaatacggaaaagggcatgacatttccaaagggcgccgggattgcccgcatgtcctgaaagcaggttcttacaatttccaaatcaaatattcgcaaacctattacaatcccaagccgggcacaagtgatttggacggcatcagccttgtagtcgctcccattgtcgtggacatttgcattggagaaaaatcgatcccatatagtaaaagccaccttttcttggagaaaaaaacagaactccggctcgctatcaacaaaatttacctggcaaaagggccttccgaaaactccgaagacatatccatcacatgggaagctcaaacttactccaaatgcccgcaacgatttaatggagttattctggcgtgcaaccatacgttccaaccaaacaacggcgcctggaaacccatcggcaaaggcccatgcatcacctatactccaacggaagcagaactaattcgtgtgaccatcggtgataaaagcttttattacgaaggcattcccaatcgtttaggagaaatttactgggccatccgcccctgccagggactgcccatggcaaaccatcactttctgctctttgtccctgacgacccggtaaaattaaatcttccgaaccctgggcttgctaactgcaccgctatccccggaatgaaaatcatcactatcggaggggatgcagggccagaaatcaaataccgaaaaaaactcaaaatcatcccagctgccggaaccgtttattataagtggatttatgaatccctatctcctccatttgctcaagcaggtgtagccagcaaatatattgattgcttaactaacatggtttaccataaaaatgacaatcctgatatagtagctgttgaaaactggttcaaaaacaaccatgataaaaaatttacaaattttacaaatatcatagccattcaaaacaaggaactatttcaaaaagttcttcatttttcacaaagttataatgagcaggaacgatatctaaccaatccatcaactaaccgaaatccagaaagtacagaaaatggatcaaattgtgcttccttagtttcttctattttacagtatagcggagccacttgggaacagatacttgaatcagctgacacaaacggcattgatgttggagaacgccatcttatccctattaaacgttttaatccctaattttcatgatacaatcaaccaccatagcattcttatcgtcggcttttatatatttctcagtttgccaaggagatatttgtcaaatcaatggtctgagtccagaagatttgaaaaatctctcttatgaccctccaaggaatgaattgctttctgaggcacaagataaaaaggcatggcagacattcgttgaaacctatgaagtgcctgtaggtaaagtacaggattggtataattccatcagggataaagattccgctgatgctgcagccgatgcgttcaagagagatgtcctgcccattcttaaaaagctgacgggacgttctgctgatataaagaaacaagtccttgctattccagcttcttctgaaatgcaaaaactgattctttcacgtatcctcacattgcagagccgcttgctaataatttttcttcctatgcaagacagtaaaaagtcaagttccgatgcttattatcatggcagtgaaaaactctttgacatatttctaggtctaacgtcaacaacagccatggatatttcaaaatttattgaaaatcaaaatgaagaccaggaaagcattgaagcagctttcaaagaaccatggacagagacatcatcttcttaaaaagcaggttacatagaaattgcgttgatctctattgaatttccatccttcttttattccccttcattcaggaaccctgtcatgcttccataatctgatgatcttgaaatactcaatcttcctcaccggttgcatcttccatttttatttatgttcagcatcctatggggatacctgccaaatcaatggactggagccggaagtactgaaaagcctttcttacgaaccgcccaacaaggaattgctctccaccggacaaaatcaaaaagcatggcagactttcattgaaaactatgaaatccctatccgtaaggttcaagattggtataattccattgtcgataaacaatctgccgatgccgcagccgattctttcaacaaggatgttctgcctattcttaaaaaactaacgggacgagctgcagacatgaaaaaacaggctcttgctattccagcttcttctgaaatgcagaaattcatattcttacgcatttctcagctgcagggacgactgctaattatcttcctgcctatgcaaaatgaagaaaaggcgagtccagaaacatgctaccgtggaagcacaaaactttttgaaattattctgggattaacatccccatcaatgattgacatttcaaaatttattgaatctcagaacgaatcacaggaaagttttgaaaccgttttcaaggaatcatggcctgaaactccatctgcttaaaaagcagtttacagcagaattgtgctgattaccatttcctcccctttccgttccatcatgattcaatacctgataatcatgaaatattccatcatcctcacatttgcatcttccctccttatttatgattcaacatgctatggagacgcctgccaaattaacggtctgagccaggaagagttgaaaaatctctcttatgaccctccaaggaatgaattgctttctgaggcacaagataaaaaggcatggcagacattcgttgaaacctatgaaatacctgtaggcaaggtacagaattggtataattccatcgtggataaaaattccgcagacgcagcggcaaaatctttttctacggaagtttcacctatccttaaaaaacttacaggacccgctgccgatatgaaaaagcaggttttatctattcctgcttcatccgagatgcaaaaatttattcttttgcgcattcttcagcttcaaagccgtctgctggtcattttcctacctatgcagagtgaaagggaaatggacgacaacacctgttaccgaggcagtgatcttcttttcgatactattctggaacctacagctcaatcagccctggacgttgccaaattcattgattcccggaatgaatcccaagagcatatagaagcttcatttaaagagccctggttcacatctgccgaataaattattaatagtgcaactattctaacctttatttggcgcaggatgtgaaaagcatctttccggaatcccgtcctctgctggaacaataccgggaactgggcctggcggacatttccccggaacagaggctcatcctgaaaggccgcggacgcctgctcgtggacgccattgcagcggaactgtgctgacggatagtttttccgcctcagagatcagcagtctgcggaatccgatgcgaaccgaacactgaaataagcgggcatggtctactttgttccctgattttcaatatccaaggagcatcccgcaaaaaaagataccggtatctgcgtattcggattttgtttttttatcccggctctttgggaaagggatttctttttgtgaccgttcggctctctgcaaaaagattccatgcaacgggaatttcagcaaggggcgtttcacaaaaacaatccttcacgccggcaacacccacgtatttaatcaatctggaactggcgtgccatttttttcaaccaccagtcccggtgcctcatctcgtcccggctgcgttccagttcccgaagctcgctgccccgcatccctcccttcatatagcgttcatccagcttgcgcgcctccgcacgggtatctttccgcagagctttgtaaaactgggcccccgtcaccagcccgccggctgcaccgctccgacccaccaggttcatgtaaagtttcttcagcctgttgtaatcctccaccacctggttatatttcaaagcggcgtactggtaacgctccttccagtcctccggccccggattgaccagacggtcatccaaagaaccgggaaccggcgcggaagacggggatgccagccctccggaggataatggcgtaagcggcggaggctggggaacgggcctgcggcttgtcctggggacaccgccgaccgtcacggaaaggggggagcgttcctccagcagagcgtccatgcgtgcctgttccaacgtttcccgcagatgggcacgttctttctgcagggacgcgttcaagtcgcgttcttctgaaagcgactgcttcagcgaccgcatgccgccggacatttccgagtaaaccagcgcataagccccgatgcaccccagcagaaagcccaggcccagcatgatgcccctttcccgccacggtccaggactgcgttccggagccggttccgaaatgtccggttccggctcatgggaaacagtcaggtaatgttccagagggccctcgtcaggcatgggctgattcagggttgggacgggaaaaacgcaggttcaagcctgttcaggacggatgcagtccgcgccgaaatacggcacaagcgcctccggaatccggatggagccgtccggctgctggtaagtttccagaagggccacatacagccgcggcagagccgtgccggaaccgttcagggtgtggcagaactggttcctgccgtcggcatccttgtaacgcaggcgcatgcggcgcgcctggtagtccgtaaaacaggaacaggaggaaacttccagatactgcccctgtcccggagcccatacttcaatatcatacgtcttggcggaggaaaagccgaggtcgcccgtgcaaagttcaatcacgcggtaatgcagccccagtttttgaaggatggattccgcatggccgcggagaacttccagctcccggaaagagtcttccggctttaaaatctgcaccagttccaccttgtcaaactggtggacgcggatcatgccgcggttgatgcggccggcgcttccggcttcccggcggaagcagggcgtgtacgcggccatcttgatgggcaggtcgctttcctgtaaaatggtatcccggtacaggttggtgaccggaacttccgccgtggggatcaggaacatctgctggtcttccgtgccgtacatgtcttcctcaaatttaggaagctggccggtgccttccatgcactccctcttcaccacaaacggaacgcccacttcctgataaccgttttccacggtctgcgtattcagcaggaagttgatcagggcgcgttccagacgggcgcccgccccacggtacaccacaaaaccggagcccgtaatccgcgctccgtcttcaaaggaaatcatgcccagattcgcggccagttccacatggtccttcgggttttcaatggcgggcttttctccccacagcttgatttccgggttggccgtttcatccgcgcccacgggacattccaggtgcggcagattgggaatgttcatcagcagggaggtgagctgggctgcattttcctccgcgacacggtccagttcccggatgcggtccccgatttcgcgcacgcgcgcttcaatagaggacgtgtcttcccccttctttttgagcatgccgatctgcttggaggtggcattgcgctcggactgcaaggcctgcttttccgtttcggcattgcggcgcgcctcatcgcaggccagaacgtcatcaacaagcttccacgcgtcgccgctgcggggctttaaccgcgctttcacttcttccggattttctcgtattacacggatgtcgagcataacgcgcacagcttgcactccatccccccgccacgcaagccaaatgaacggccttccatggaaaaacgttaccctttcacggaaaaacgctgcgcgcagaggcatgctttcccgaatgccgcccctttccggaaactaccgtttttcccgtgtcagacaatgatttttttccttctcaggaaaaccgtacagcaggaggaccggactctccatgtttccgggaatcatggacatccggcgccagggtgtattgcaggaaggaccgggaaggaaattcctcccgttttcaacaggcggagttcctttcatcactatttgttcttgaagaatccgggcggctaaggatagtgtaaggacatcatgcaacaaaccgcacgcgccgctgtcctgacagcaccaaagacatttgaaatccgtgaatatcccattcccgccatcggagacgatgaaatgctgatcaaggtggaagcctgcggcgtttgcggaacggacggccacgaatacaaccgggaccccttcggcctctgccccgtggttctgggccatgaaggcaccggggaaatcgtcgccatgggcaggaatatcactaaagacaccgccggaaatcccgtagcgctgggggacaagatcgtcacctgcatcattccctgcggcacctgtgacgcctgcctgaatactccggcccgcaccaacctgtgcgaaaatgtgggcgtgtatggcctgatgcctgacgacgacgtgcatctgaacggctacttcggggagtacctcgtcatccgcaagggctccacatttttcaatgtttccggcatgacgctggaccagcgcattctggtggaacccgccgcagtggtggtccattccctggaacgcgccaagtccaccgggctcctcaagttcaattccgtggtgctcgtgcagggctgcggccccatcggccttcttcaaatcgccacgctgcgcacgctgggcattgaaaccatcatcgctgtggacggcaatgactcccgcctggaactggccagggaaatgggagcctcccgcacgtataatttcacccggtacgcggatctgaacgaactgctggatgccgtgaaaaaggacaacggcggccgcctggcggacttcgtctttcagtgcacgggcgtaggcaaggccggggccaacgcctggaagttcgtgaagcgcggcggcggcctgtgcgaagtgggctttttcatggatggaggggaaagcgttatcaaccaccattacgacctctgcaacaaggaggtgaccgctgtaggctcctgggtgtactccccgcaggactacccaactacattcgactttctgaagcgagcctacggcatcggcctgccgctgaccaagctgatctcccaccgcttcaagctggatgaaatcgcggaagccctggaaaccaacgtccagatgaaaggcatcaagattgccgtcatctgcggctagccggaaaactcttcatttcttcccatgccgccgtttttcaaaaacggcggcttttttacgccatctttccccgtaaaaaacactcagcctcccaaagattaatcatcatcccaatccagaaaacggcccgtattgggaggacaggccatagcggaaacgattttttccttcaaccgctccagtgcatcagggtcaagaaccatgggttcgctcgctttaaggcacaaacctttccggtacacctgcctttccaacgtcagatatttattgacgatgccattggaattcagggcggcgtcaacgacgaaatgcagcagataatcagcatctccaaggtagaaatcaaactcataaatccaggaaaaacagtattcttcgtcctcttcgcaaatcatttccctggcaggaattccgcaatcatacagatgattgagttccctcaacagggtcagaatatgctcacgcctccgcacggttacctggcatcccagctccccaaccatgccctgaaggcagtcgatgaccaaatcatcacactgttcttccatgtcaaggagaacttcccggacctgcgcccactgccgctccaatggttcctcggaatacataaaccgggcaaagggggaaggttcacctgccccagcgttccgtaatgccgccgtaggagtcaatgcggcggtcacggaaaaagggccagatgcggcggtggtcttccaatgcgtccaggtcaaggtccgcgtacaggatggcttcatcgctgacgggagccttcgccacaatctggccatagtagtccgccacaaaggactgcccccagaattcgctttccccttccgtccccacccggttgacggcgcagacatagcagccgttggctacggcatggccgcgctgtacggtttcccacgcgcagtgctgctgttcccccagcaggggcttttcctccggcagccagccgatggccgtggggtaaaaaatgatttccgccccctgcatggccgtcaggcgcgcggcttccgggtaccactggtcccagcagatgagcacgccgatgcggccgaatttggtgtcgaacgccttatagcccaggtcgccgggggtgaagtagaatttttcttcaaacccgggatcctgcggaatatgcatcttgcggtacatgcccaggaacgaaccgtccgcatccaccacccaggcggtattgtggtaaagcccggtggcgcgcttttcaaagccggaggcaacaatcaccacgcccagttccgccgccagtttcctgtgggcttccgtcaattccccgggaacaggttccgccaggtcgaataaatcgcattcctccgtcctgcaaaagtattccgtggtaaaaagttcctgggtgcagacaatctgcgcgccgttggcggcggcttcacggatggcggattccgtcttttccttgttcacggaaggccgggcatctgcggacagttgaatgagtgcaattttcggcatgccccttccttaccccgtttcccttcccattccaagcagggaaaatgaacgtggcgcgattatttggtggaaaacggcccggaaagtgctatgaaattgcaatatggaacccgtcacccccactctgcccgacgacgacgtagccgccattgaccggctcggcgccatttacaaggagctttcctcggaattgagcaaaatgatcattggccagcagcgcgtcgtggagctgctgagcatcgccctgttttcccgcgggcatgccctcctgatgggagttccgggcctggcgaagacgctgctggtcagttccgtggcaaaaacgctggaccttagtttcaaccgcatccagttcacgccggacctgatgcccgcggacattaccggcacggacatcatccaggatgattccgccggcggcaagcgccagttcgagttcatcaaggggcccgtgttcgccaacatcgtgctggcggacgaaatcaaccgcgcccccgccaaaacccagtccgccctgctggaggccatgcaggagcgccgcgtcaccgtcatgggccgcaccttcaccctgctccccccctttttcgtgcttgccacccaaaaccccattgaacaggaaggcacctaccccctgccggaagcccagctggaccgcttcatgttcctgattgaagtggactaccccacggaggaggaggaaatgcgcatcgcccgggaaaccaccggaacccggagcgaggaactcaagcacatcctctccggggaggaaatcatcttttaccaggatctggtgcgccgcgttcccgttccggaacatatttacgagtatgccgtgaaactggtgcgcgccacccgccccaccctggaaacttccccggaatgggtaaagcagtatgtagcctggggcgcaggcccccgcgccgtccagttcctgattcttggggccaagacccgcgccgctctccagggcagctacatcgtccgcagggaagacatagacgccattgtggaacctgtgctgatgcaccgcgtggtcaccaacttcgccgcggaatcccagggcatcacgccccgtaaggccgtggcgcgcctggcggcggaaatctgaccgccgtcccggcatcatcaatcccctttccctgccccatgaaatacctgaatcacaacctgctcagccgcctggggaaccttcccctggaagcgcgccacagcatgacggggaacgtatccggccgccacagaagcgccagccgcggctcctccgtggagtttgcggaataccgcaaatacgtggccggagacgatacgcgccgtctggactggaaagcgtatgcacggtcggacaggtattacatcaaggagtttgaagcggataccaacctgcgcgcctacatcgtcatggatctttccggctccatgaattatcatccggagcaggtggagaccaagtatatgcgcgcgtgcaggctggcggccaacctggcttacattgccatccggcagggagacgcggtgggactgagttttgcccggcagacgaaggacggcaccgcgctgcacatccccgcctcccgccgccccgcccacctgaacgtgctcatcagccagatggacacgcattctccgcagggggagaccgtccttcccgataccctgcatgaactggcggaacgcgtcggccgccgcgccctggtgttgattttctcagacctgttcacagatacggcggagcttaaaaacgccctccgccacctccatttccgcaagcatgacgtagccgtattccatctggtggaccagctggaaatagattttgactttgaccgccccatccgcttcgtggacatggaaggcggcggctccctgattacggagccggaccttatcgcggacgagtaccgggctatcgtggccagctatctggaagaaacgcgccggatctgcacggatatcaatgcggactaccgcctggtcggaaccggagattccctggaagacgtgctgaccggcttcctgatgggacgtcagaaaaagaaggcggccggataaatgcccggctgtctcacggaacggttgattgctccgcggaacggatgcaggatgcacccagacgctccccggattgcaggaagcgtctgtttttcatctctttcccttttttccattgtggatgcacccgttaaaatgatcgtgggcctgggcaacccgggcagaacctatgaagacacccgccataacgcggggttcatggtgcttgaccgcctggccgcccggtggggggccgtattcaaggcggacaggcagcgcaagtgcgaggtggccgccggccccggcgtcctgctggtgaaaccctccacgttcatgaatgaatccggtctgtgcgtgggccccatgatgcggtttttcaaactggatccccgcagcgtgttcgtcattcatgatgaagtggatttccccctgggcgtgatcaagctgcgggaaaaaggctccgcaggcggccacaacggcattaaatccctcatcgcccacatgggcacccaggaattcccgcgcctccgtttcggcatcggccagccccgtggcaaaggggaaatgatagggcacgtgctgggcaaattccgcccggaggaacgcgagcttctggacgtgacgcttggcaaggcggaggacgccgtgctgtacaccatggaacacggcattaccagggcaggcaatattttcaacgctgttccaggctgacagccgcatgaaaggccgccccatttgcgccatgacgcatccctggacgggccggagagcgttttttcctgaagacggagcagcccgggctgcaggatgatacggctgcctcaggcgcccggcggcgtccaggaatactcagggggcgcgcatgccttcttttttcgcccgcccgccatgtacggtattgctaaacaaacgggaatccgttaggatttttgcaccttttcccctctcctcaggaccaatcctgcttcatcttcatggctgaattaagttcacaagctccccgcaggcacatgcaggccaacaaaaggcggcatcccaaggcaaagcccaggaaacgattctggagctttatccaaaagcttgtcctgtggtgcctggtgatggcggctatcggcgcggccgtgggatacttcggattcatgatggcctggaaacgttatgacaactgggcggcggaatttgatctggaacgcatcaacgacctggaaaaacccagcattatttatgaccggaacggggaggaaataggccgtatttatgtggagaaccgcagctacgtcacgctggacaaaatctcccccgccatgattaatgcgctgattgcccaggaagattcccgcttccgggaacatccgggctatgacttcctggggattctgcgggcaggccgggagtatatccacaacagcggggacgccaaccagggcgcctcctccatcacccagcagcttgccagaaatgcgtatgacctgaaaaaccgtgccaaagccaggaatgagggcagctttggccgcaaattcgtggaaatagcgctggcgcgccgcattacggaacggtacagcaaggaccaggttctggaattttacctgaaccgcgtttactttggcagcgggttttacggcatccgggccgcttccctgggctacttcggcaaagagccggcggatctgaccacccgggaggccgcctccatcgccgccctgatcaaaaacccgaacggactttcccctctgaataattcggctagcaatctgaaatggcgcaaccacgttctcaaccgcatggccaaggagaaatacattacgccggatgaagcggaacgcctctccgccatggagctggggctgaatcccaagccgctgaaacgcggcgtctcccacatttacgaccgcatttcctcagaaatcaccgcatacctgggggaggagcgcgtcaatgccgccgggcttaaaatttacaccaccattgacaggcagctccaggaagttaccggaaaagccctggaacaggctctggaaaacattgaaaaacaacccggttaccgtcatcagaaggccgcagactaccacagcggttccgcgaacaagccgcgctatctggaaggagcgctgctggtggtggacaacaaatcaggcgccgtcctggcctaccacggaggcagggattacaccaagcgccagtatgacgccatcagggacggagcccgccccaccggcacctccatcctccctttcctgtacgctacagcctttgacacgggaaaaagccctgtcacccgcattctggacgatgccatcgacaaccgcctgacgggcatcggcggttcggaaggaatcctgggggaatggggggcggaaaactccaaaaaccgttatgaaggcatgattaccgcccaccgcggcctgtccgcctccaaaatcgccgcctccctgcgcatggggatggagatgggcacggccccgttcgtcaagaagctgacggatttcggcatccgcaagcccgtgagggaagcgggcagcacggaagtaaatcccgtttaccgccccaaaattttcgtgggcacggagcctgcctccctgaaggaaatgacgctggcctacactgccatcccgaacgggggttcccgccctcaggatatttactatctggacaggatagaagatgaagacggccagctgatctgggaatccacccaggcgattgaaacccggaacaatgcccagatacggaagggggccacatccacagccacggctttccagcttcacaacatcctgaattcttccctgaaaaacggttcagcccagcgcgttgccccgtatctgccgaaaaacttcaagggcggcgtgaaaacaggcaccacgtacgacttcgcggacaactggctgtttgggtatgacagccgcattacctgcggcatctgggtagggttcctggaaggcaaaaagcccatttatcacggagccttctcgtcagacacctgcgcttccgtgctgggcaccgccatcacggaagcggaacggcagttccctgccggagaactggcccctccccccagcgtagaacgggtggaaatctgcctgaccaccgggaagagggccacgcacagctgttatgacattgacccgtcggataaaaaataccgccgacacaccatattcgaatacctccgcaagggggattccagcctgcctttctgcgacctccacggggaggacgtctccgcacccgtctccaccttcacggcccagaaccgcattcttcccctgccgcccatcctgcccaccaggcctatcctccagggggacgatccctaccatacggagctgaaccaggtcccggccaaccgcaactttgaactgctgggggctggcgaaaacgtgccggaagcgcaagccatttccgcagatcccgtttcttcagaccatacggatacaagcattacgctgccggcgcccaggcccatcaccattcccgtgccggaattcatccacctgtaactttttcccctcatgccttccccatcccaggacacggtagcctgcacatgcccgtcatgcggcaacctcttcgccgtgaaggcgtcttttctgggacgccaggtaaaatgccccatctgcaccgcttcagtcacagccaggcaggaagaaaagcccaggccggaaacggaagaacaggacgccgtcccctgcctctgccatatttgcggcaattcctttgccgtcagggccgcctgcgtaggcagccgtgtggaatgccccgtctgccactccgctgtcacggccgtcaaacgggaagaagcgctttcaacattcccgggccggacgcctgaagctgcagagaaagcgcccggaaatccgaaacacacggctattccgccatctgccgccggtgttccgcacacttccgcgtactccgctccgcatacaccgctcgcaccaaagaaaaagacggacaaacggaccatttccgttcacgggcccaccactccgggccccaataaatccacgacaaaaatccgtaaaaggaaagagggaaacgccgctccggccattgccgcgccacgctgcgccgccctggccccggaagagccggaataccgcgctgccgccgcggataccatgcgcagtgaacgccggcccacctggcatatatggctttttgtcgcgggactggttctttcccttctgggcgtgttcatgttcctgcgcgggagggatatggaagcggaaaactccaaacttctgaatatctcagaccggttcgtggatcatgaagcgctcttttcacaggaagtgaataaagacctgctggagcaattgcagcagagggagcggcaatacctcatagcccacagccgcagggaggaagaccggaaggcggaatccatttccccccatattacggcggccatgaatgaactggccctctactgcatggcggaatcggatgaagagaggctcaactacgtaatgaatcccgcaaccgtagctcccaaaatggcctattgggcctcctacggccaatacaaggactacctgccccaggaagcgggcagaagctccaaaaacggggacctgcttcagatctccgtgctgatggacgacaacactatccgccctgcggttttcctgtatgaccggaattcaggaaaatggaagctggactgggaagcctgggagggctattcccccatgcttccggcggagctggaagccaaaaagccctccacccccgttcccgtcagaatcatcctaagcatgtccggcatttatcagccccctttcctggaggaatcctccgcggaaagctaccgcaacacgtcatatctcaacttcacccttgagttccccaacggggaacgcctgaatgcgtacgtggacaggtattccccgcttgccctggaactgaccaggctgctttacaacggccccgtgcgcacctgcgtgctcatccgctatccggaagacctgcccggaaaccgggccgttattattgaccagcttctgcactccggctggatgagcgacgccacccgcaggcttcttcccaccaataattgaaaatcaaaaatcggttcccgctttccatgagttccaaagcactagcgcaaacacaggacaaagccctccaactcaacctggcttccaccatttacggcacctttgcggaaatcggagccggacaggaaacggccaactggtttttccgggcatccggagccgccggaacagtggccaaaaccatttccgcttatgacatgaccgtcagcgacaccctgtacgggccggtcaagcgctacgtttctgaagaacgactgaaaggcatgctggactacgaatttacccagctcgtcaaccgcctgggcccccagcgtggcaaagacacccgcttctttgccttctgcaatacggtaaaagtcaaaggctaccgggacaacggcccctggcatggctggataggggtgcgcttccagctgaaaccggaggcaaaaccgtccgacctgattattcacgttcgcctgaacgacccggaccacgaccgccagatgaaggacctgggcatcctgggcgtcaacatcctgcacgccgtctttttcaaaagggaccgtctggaggaattcattgaatccctggtggacaatctggatccccggctggtggaaatagatgtcgtccgttttgaaggccacggtttttccatggtggacaaccgtcttttcgcgctccagctcgtccagtccggcctgacgccggccaccctgttcctggcgaacggccaggtggcccaggcggcggatgtgctgtacaagcgccccatcgtgttgatgaggggcagtttcaaccccgtctgcaatctgcatctggaagtcatggcccaggtgaaaaaaaccttcctctcccacatcaatgagacgcaggcggaccgctgcatggaaatttgtgaaatatccatgaataacctgctccgcggcgatgatgtggaccatctggaattcctggacagggcggacagcctcaaggctctcggcaaaaacgttctgattaccaaaatggcccgtttcgacaacctgtccgggctgctggcgcgctacacgagagaacccattgccatcgccctctccatcggcctgctgaatgagctgttcaaggaaaaatggacggaggacattcccggaggcattctggaatccttcggacgcaccttccagaacaaaacgcgcctgtacgtctccccgtggctcaaccgcaaatccggggaattcgtcacggcacgcactttccgcgcgccggaacaatacgtgcacctgtaccagcacttcctggcgaacggcctggtggtggacgtgccctttttcaatgaattcctgctgcgccacacgccgcgggacatccagcgcatgatcgctgcggatgaagacatctggaaaacgctggttccggaggaagcgcaccgttccgccctccacttccgctgagttccttttcagcaggccgccccttcctccccgcggcacggccctcccaatgccgcggtctctccgttcctgaaaccggataatccggcacggcccctcccgcctgccctgccgggcttcccgccactggtcaggaaaacttaacaattccgtaagattgtcttgccataaggcaggaatctcattaaggtcttcgagttccatttttatcatgaataccattattatcggctcccaatggggcgacgaaggcaagggcaaaatgatcgatttcctgacggaatccgccgacgtggtggcacgcggccagggcggcaacaacgccggccatactgtaattgccaatggaaagaaatatattctccacctggttccctccggcatcctgtggccggacaagctttgcgtcatcggtaatggtgtggtgctggaccccatcggcctggtggaggaaatcaatgaactccgcggccagggcgtgaccattacaaaagacaaccttctcatctccgaccgcgcccacgtggtccttcccttccacaaggaaatggacgccgcccaggaatccgccctcggcaaaaaagccatcggcaccaccaagcgcggcatcggccccacttacgcggacaaggcacgccgcatcggcgtgcgcatggcggatatgagggatcccgcgatttttgacgaagtgctgcgccgccgcatcaagatggcgaatgcggaaatggaacgcatgggccttcccgctatggatgaagaaaaaatggtggcggaagtaagcgccgccgcggatgtgctgcgcccccacatcaccaacaccattccggttatgcacgaagccgtggcctccggaaaaagcatcctctttgaaggggcccagggagcttacctggatgtggacttcggcacctatccgttcgtcacctcctccaacacctcttccgctggcgcctgcaccggcacgggtgttcctccgcacaaaattgaccgcatcatcggcgtctgcaaggcctacaccacccgcgtgggcgcaggccccttcgtcacggaggatgaagacatctccaaccatctgcacagcatgggccgcgaattcggcgccaccacgggccgcccccgccgttgcggttgggctgacggcgtgctgctgcgcttctccgccatgttcaacggttttgatgaaatggccatgaccaacctggacggctacgacaagtgcccggaaattaaaatctgcacgggttacgatctggacggggaaatcctggcttatccgcccgccacagtggatgaatgggaacgctgcaagcccgtgtatgaaacggtgcccggctggatgcaggacatttcctcctgccgttcctgggaagagattccggaacaggccaagaaattcgtcaaacgcatgagcgagctcatcggctgccccgtcacaaccgtgggcgtaggccccgaccgcgaacagacgattgccgtgcaataaacctcggcagttctcgttattatttccttcaaagcagttccgcatgtatggcggaactgcttttttattgtcagctaataaaggccgaacacacgtttcaacgctttctccgccaccgtttctccacggcagcggcatgggaaaaacttattttccaccctgcatctttgcatgaagcgcggaaatgcctcctctaaaacacatgaaaacggcaattttgccgcttccaggtcaggaaaaagcaaataaatatcatccaaaacagcccggcggaactggtgaagctgccgttggaaagcccatgcctgggagttcccggaatgatttgacggatacggatacttccctcctgatgataataaaagaggaggcgggatctttcccgcctcctgtaaaacagcaattggactccccggctcaggcacgtctgcggcgcatcatgagggcagccagaccaatcaggctgagggatgccgtggccggttcgggaacggcagccgccgcaatggcattaagattggcttcctgggaagcaccagcctgcaacgtggtattatccacgacaaggtatttgacgtaatccgtgccataggtaaatgaagtcagggctccgaacccgctcgctttcaaccctgaatcctgaccaccataagtggtgacggttccttcggaatcaaccagagtcaggtaagtccaggttccggtgctggtaatctgataagtgatggcggctgattcatagctgttttcggtgaacaattccttcaatctcgtattcaaattgagttcagaaccgttgacagaagtaatcgtgcggttgtagttctctccttgccaggaaccataaatgcccgccgtgggagttcctgaagaaacgtagttgaggcccaggccgatcatattattattggcggaaaaaatattcgccttgacgttacctgccagaatggcgttttggaaagcctgagcgtccagggccatggtcacggagaaattgccgtaaccggagtttataccctccgtcagggtatatgatccgcctgctgcctgcaattcactggaatccaaagtaaggacggttgccccctgaaccatgagggaagaagctactacacaagaaagcaaaaataatgttttcttcatttgactgttctaggttgaaaagaaaagagcgacgcgctctcccagtgcggtacatataggggatttagaatccgggaacaataacaaatattgaaaatcaacgtctaattcatcttaatcagttgttttttaatatcatatataatttctggtctttttttatttcatcttatccgaatacaggtaaatatgttatgagaaggagaaaatatttaagtgcgcagcggattctaaattcgcaataaaaattacagagaaaatctgatgcttttttcccgttttacactccttttggctccctcacccgacgtacattcagacagccccctgcaaaaaacaataatctccctaagctaccatgttccaactggttccatttcttttgcggaaggaatacggcggtgggagctacccctccgcttgccctatcatgcctgtcttaggaaaaggcccctgaaggacagcccgcctttcctttttccggaaagacggagaaaaacgaatattcgtgtcagcatttaaacggagttatgatacttccgggaaaagccttgtctgactgtctgtatgagacatgccattcttccctccatgtgcgctgttgccgtcgcagcctcctgcagtcccgcccttgcccaacaggcggctcccgctgcggcggcttcccctgcttacctgaacacggaacgcggtctgcgcgtgaaaactctggaaggcagggcaataagccccagcctgatgaaaggaatgcgcccggaagaacaaatcaccaaaaggacgcccggcgttcccaccaggcccagcgtactgcttcagcatgaaggcggaacttccgctcccggcctggaatggtttgtggccaggccccttaaaatgatgccgtacctggacagttcctacgttttcggcaatacctgtgcggaaccgaacgcctggatacgcgaagacatgatttccaccggagcgcaaaagctcaagaccgctctctccagatacggcattacttattccgcccagttcggattcaactacacggggctgacgggcggcggcctgaacggaaaaacggatttcccctcctacaatggttccctgctgaccaatatcaccatcttccgcaatcattccacgggcagcggcctgtacctggcctccgagttcgacttcggcaacggctttgacttcaatgaaggcagtaaaggccccaaaaccacgctgggctcactccagaaccccaccagctccttccagggcccggacccccacctgagcaacctgagcctggcatgggtgggagcgggaggaaagcttctgctgatggcgggccagctggacaccaccaactacatggaccacaacgcttacgccaattcccataacaataacctcaccaacagcgttttcggcaataatcccgtactccccctgacggataattccctgggattccatttcgcgtggcagccaaccacctccttttacgtgatgggagccactgccgccaataacatggctcaaaaccacaatcctttccggaacctgaattccgacaattggacgaacgtgcttgaattcggctacgtggcggaagatttttgcagcatgggccccggcgtgtaccgcctccagccctttttcaccaccagcaacggtgaaaacgggggcggcgtggccgtaaacttccagcagcagctgggccgcagcagccacctggggtggttcttccgcggcggctgggcaagcgatgacgcagccacgctgaccggcgtacgctgcgcggccaccacagggctggtgcttctttcccccttccggggaaagggcgcatccaatgacggatacctgggcctcggtttcctctggcagcagggggctaaaaagaacggcccgtacgtgaacaggaatgaatacggcattgaattgacgtacgtggcccaggtgacgcccaccatgactctccagcctgatattcagcttgtcaagaatcccgtcaacggccgcagagggcaaacggcggtggttttccagatccagaacgtctggtcctggtaaaagccctcccggaaaactggaaaatattgatcgcatttcccggaaatcctgtctaaatggaaatgttcttatttggaccacgcacatgaagcgcattcagcaaccttccatgcaggaggcggagcaggcctccctgaatcatgagattttaaatacatggcgtcccggggaaactctgggggaacacatggagcgccgcggcgtcagccggcgcgaattcaacaaatggtgcctgaaaatgatctccctgatgggtgttgccactgtaacgggcggcatttccaacgcccaggagattgcggacaagatggccgcattgaaacgtcccgtagtcatctggctccagcttcaggaatgcaccggatgcctggaaagcactatccgcagctataacgaggaaatcggggacatggtgctttccgccgtctccatgccttacgtggaactgctgatggccccttcaggagaggccgccaaccaggctctggaagacgcgatcagggagccccacatcctcgtcatcaacgggtccgttccggttaatgacggtggggtgtactgcaccgtggccggagataccgtggagaacatgctgcgccattgcgcggaaaacgcctcccatatcctggccgtgggttcgtgcgcgtacttcggctccatccaggccgcccgtcccaaccccaccggggccgtgggcatccgggacatcctgacagaccgcacggtcatcaacgtgcccggctgcccgcccatcggagacgtgattacggccgtcatcatgtacatccttacatttgaccgcgctccggaatgcgacctggagtcgcgcccgctgatggcatacggcacccgcatccacaataattgcccgcgccgcgcccatttcgacgccggacagttcgtcaacgtgtttgacgacgagaacgcgcgggaatgcttctgcctgtacaaggtgggctgcaagggcccggatacgttctctccctgccccatcgtcaaatggaatggcggcgtcagcttccccatccagtccggccacccgtgcatcggctgtacggagctgtacttctttgaccgcatgactccgttttacaagacgctgccgaacgtgaacggcttcggcgtggaagcctccgccaacatcatcggggctgtgggcgtagccggcgccggagcggcaatcgccgcccatgccgtgggctccgccattcattacaggaagcagcacatgaaggaggaagcaaacgtctctctgcccgccttcggggacgctcccggctcgcccgacaaggacactgaagaatagccagaagccctcaccaccagattaccatgagcaattacacatcagcggacgttccggaatccagccgggtggtcattgacccggtaacgcgcatcgaaggccacctgcgggtggaaatggaggccggggacggtgtcatcaaaaatgcctggacgtccaccacgcagtaccgcggcattgaggtgatcgcctgcaagcgggacccccgggacgtttgggcttttgtggaacgcatctgcggcgtctgcacgggtacgcacgccatcgcggccctggctgcggtggaagacgcgctccagtacccggtgcccgtccaggcccgcctcatgcgagacctggtcagcggagccctgggcatccaggaccacgtcatccatttttatcagctccaggccatggactgggtggacgtgatgtccgccctgaaggcggatcccgcggaaaccgccgccatcgccaagtccctttccgactggcccctgtcctccgccgcgtatttcgccggagtgcagaagaagctgaaggactccatcgcctacgggcaatattccatctttacgaacggctactggggccatccggcctacaagctgccgccggaggtgaatctgctgggcgtggcgcattatctccaggccctggtctggcagcgggacatgatcaaaatccacaccatcctgggcggcaagaacccgcacccgaacttcctggtcggcggcatggcctgcgccatcaacatgaacaatgaccaggccatcaaccagttttccctgagctacctgaagcagctggtgcaaacctgccacgatttcattcataaagtatattatccggacattgtagccatcgccggattttataaggactacgcccacattggcgcgtccaaccccaactttttctgcaccggggctccgtctgaaatcaacacgggcgcccccgccggcaaaggcatgatcaagcccggcgtgcttctgaatggggattacaggaacgtgcttccctttgaccaggacaagatcagggaattcgtcaccagctcctggtacaggtatacggaaggcagggacgcgggcctggctccgtatgacggggagacgaatgcggactacaacggccccaggccgccctacaaatggctttccgaccacccgcagtacacttgggtgaaagccccgcgctatgacggccacgcgatggccgtgggtccgaacgcccgcatgatgattggctacgcccagggggtttccgccatcgtggaacgggtggatgccgcctgcgacaagctgggcctgccgcgcgacaacgccttcatgaactccacgctgggtcgcgtatacggccgtgcgctggacgccctgatcaacgtggacatgatggtggaccagctccaggaaatgacggaccgcatcaggaacggggaaacctccaccttcaacccggaaaaatgggaaccggaaacctggccctcctcctgcaagggcgtgggttgggtggaagcgccccgcggcagcctgagccactgggtacggattgaaaacggccagacggtgaattaccaggccgtagtccccagtacatggaacagttccggacgggacgcggcggggcagatggggccatatgaatattccctggcccataccgggaaacacccgctggtggacccctcccgcccggtggaacccctgcgcaccattcacagctatgacccgtgccaatcctgcgccgtccatttgtttgacgaagaaggggaggccattctgaccagacaggacccgtgaaaacgactcttatcgataacgacctcaccctggcggtggaggatgccattccggccagtccggtgtacgctccggaagaaatcctggctctggccgtgtgcgcctcccccaacggcagcagggacgcgggagacctggccctgctccatgccgcgcgtgaacgcggcataaccctcccttacgcccagcgggaaaactcctgggaggctccctcccgggaaaggccgtacagcacggctgttctgaaagccgcagacaaggcggacgcctcccctttcatggtagcccgcggcaacctgaaggcgctggaaaaactgtgcgaagtcagctccctggaaaaggagcgcatgaacaaggcctttgaagagcattccccctccggctttgaacccgtggccgtggccgtccaccggtccggcgcgccgtggcgcctgttgggcgtcgtgcccatgcacgccatgagggacgtgcgccgcctctccatggccaaggccaatttccgctatttccacgtctgggactggcctctgcgcgtgctgcactggacgtgggtgctctgcatcatcggcctgtccgccacaggcatctgcatcgcggaagggtggttcctgaaaatgggggatctgcacggggctttccaattcggaacgctccgcttcgtgcattacgcgctggggtggattctggtggtggtgatgatgctgcgtttttcctgcttcttcatggcctccaacaaataccagagtttccgggccctgttccccgtttccagacaggagtggaaggatttgtacgccacagcggtggactacctgttcgcccgcagttatgacggcccccgctacatcggccacaatcccctgcagcagtggacatacacgggcgtgtacgtcctgttcaccaccatggtggtgaccgggctggccctgtatgccctgtatgagccgcgccactggttctaccgttggttcatgccgctgaacgacttgataggcattccgtacgtgcgcctggtgcatttgatcggcatgtggtgcttcatcatcttcgccatgatccacgtgtacctttccatcctttccgggaacgtggaccgggacggcaccatctcctccatgttcagcggcggacgatggctgcgcaagggcgtcaaattccgggatgaataacctctccgccctccccttgacatgaaattggagccatacacggaagaactgcggggctgccccgtgaagggaaatgcctatcccgtgctcgtgctgggcatcggaaacccgctcatgggggacgacggagcaggcgtggagctggcccaccgcctccaggaacgggactacggcccgctggtccacgtggaggaagggggaacgcagggcatgaccctgcttcccctgctggaagatgcggacacgctcatcctgctggacgccgtcaggacgggggccctgccgggaaccgtcgtcacgcgcagccgggaagaactgccgcgccacttttcccgcgttatgtctccccaccagataggcatgaaggaagtgctgggggcggcccagctgtgcggcaccctgccgcgcgccatcacgctggtgggagtggaggccctgcatacggatttctgccgccccatgtccgcggaggtgcaggaagccctgccgaaggcgctggacacggcggagaccctcatcgcccgcgccctggcggaacatcaggcccggaaaaacgcccatgcatgaagtaggcatcatggaaggcgcgctggacatggcccggcggcttatggaaaaacgcggaggaaacaggctgaggcgcgtgcacatgaccatcggcagcctgagcggcgtggtgccggaagcccttcaatccgccttcctggccctgaaagactcgtatgcggcgcaggatgcagacctggacgtcgcctgggtggaggccgtgtgccgctgtgacgcatgccgggcggatttttcctttacggaacacggctacatctgccccggctgcggagaaccggccctggccatcctgcgcgggcaggaactggagctgacccgtgtggagtgggaatgaacagtgccccttccgggaaaaataagggaaatttacgcgaacactttccccggatggatggtctaataccattggagcgcatccatcgcgcttcaaacgtcaaaccaactatgtaaccagagccatgagcaatatcaacccattcattctaacagggatgatgccgctttcagcctcatccatgaaccgtgtctcctacatgtgcccggtcaccatcagcaatgatgtagtgcagggccagacggacattcaggattcccttaccgttgattccggcggaaatctttacatcatcaacgctcctgtttacgtgggcggccccaaccagccggaccacgggcaccgcaccgcccacctcgtcatccggaacggaggcgccatgacgctcttgggcaacctgccggaccatatgaccgttttcctgggggacaaggccaacggcagcctggaaatcaacggcggtcgccttctgatgggccaggggcgcattcagggcgccagggagcatgaaggcagaatcgccatgacggacggctggctcttcgcctcggaagtggatctgccggcggagggctcggaactcgtcatcaggcacggcctgatgcgtatcagaaaactctccggcaatgcatccacccgcatttacggaggcgttctgcacgtaaaggaggaagcccgcgccagccgcatccatctgatagacgacggcgtgctgctgctgggcagcgtcaccagtcagccctccgcggacgtcatggccggagcgggcatcaacttccgcggggacggcggagcgctggtaatccgcatcccccacccggaaaacgctctgacgcgcacgcgggaagcggaacatgtctttgacgaactgctccgtaggggcaagctctttcatgacagtgaacccatgaccagcttccaggggttccatatgagggagttcacggggcatgacggactggcgtacgccgcgctgcgcccctccgcccagctggacgcggaacagaatcaggttacccgcctgctccatacgttcatgtacggcggcagtgaaaaggacatgcccatctgaacccctccggcaaatggaaagccctcatcaaaaaaccgccggcattccgtaccggcggttttttcatctgttgatctgctgaaaaacggaaaaacgttatttcaggaatttaatcgtgaagggagccacataatcgtaattcccgttcgccgccttgacggcagcaataatggagaaaacgatccaagcgatgactaccacgggggcgagcacgaacccgatcaggatcaaacatgaaagacaggccgcaaccgtataaatcgcccaggaaatctgggcattcagaatattctttcctactttgtccaccagagggttggcatccttccagaccagccagcagatcaggggcggaataatgttcacgccggcggagcctccgaaaaagacagacaccagcggagaaaccgccgtcaggatagcctgcgttttatccgattgtttctcaggggcgggctcctgaaccggttcctggatgatttgttgttcttcgtccataaaaataaagagatggaaagcggatgaaggagaacggaaaccttttccgtttcattccgccttgatgagaccttttttacatattcctccccgtagtcaagcttccagaccgtccgtcccctgaataaaaaacgttctccagcaatcatccttgccgccacgcaggccggaagccatactgccgggatgaccaatgccctgacgctgctcgtcttctccgcctgtctgggagcctgtgccccgggaataccggaaatcccgcctcccgcttcttccgtcacccgccgtgaagccctggcagccagccgggcctatacctccatgatttggcggggctctctccggaatgtccgccacgggacggacggggacggcatccggacagacacgccggacgcttccgcagccggatatgatgccggagcatggtggaagccgggcatgcgttccatcggcatgccgtacaaatggggcggcttcgacaccccgcggcagttctccgaacgcctgaaggcggatgccgccaacggagggcttcccgccgcggccggagatatgggcaccccggaaaagcaggccgcgggagacgccgccgtcagccgctttgccgccggagtggactgctccggcttcgtctcccgctgctggcggctggacaggcccttttccacacgggaactccccgccctctgcacgcggcttccctcctgggaagacctccggacgggagacatcctgattgcgccggggcgccatgtgctcctgttcattcagtgggagggaacggaaaagaacaggttcctgggcagtgaagccggccccctgccggcctggaaatgttcggagcatgtgttcagccgcgccatgctggaaaacagcggttaccgccccatgagatacaggggcatgcgggactgaaaacaggttccggaacagccgtgaccctctttctttcccggaataggaataagtggaaagacatcgggaaacattccggaagttctcctcccccccccttccataaaaagaaacccggcatcccatgcggcagggatgccgggctgcaggccactccgtcaaaggcggcggcctggccaaatgccgggaattacaacggctgtacgttcatatggaacaccttcccctggaaggaggagccaagttccttcagaggcagaatgaacgtggaacggtgaactttgggacgatgcttgaatttgtctgagaaatccttggacttgtcggaaaaattcttcagcacggcagttccggcaggttccccgtcaagcaacaggctggttttctccggttctcccacaatttccaccttgaccttcttgcctacgggcagcttggcgccgaaggaaaattccagagaatcgtcacggcggaatccgacggtgccgtccttcatgaccgcaagcaattcgccctcaggcgcggcaagcagcacctgctccttcccttccggagcggcagtcaattccagttccatggtcaggcggtaattcggccccagggcaggtttgtccagcttctggggaagggaggaaggcttcaccgtaaagggctggctgtctttccatttatgcaggggattggtgcgcggagcgttgccgatggaggaaaccagctcgcgatgctgttcaaacgtatccggagccttggcggttccccacagtttctggctgagcacgtccatggaaccggaaatgatcccccaaatgtcataaggcgcgtaccccgtatgcataatgtccgtttcatcattccagacggcgaaggtgcctccgaggagctggggatgcccggaaggcagcgtttcattgccgatgcggttgggaatccagttattgtacagccccttatggtttctgtccatccggtagtagccggcaaagggaacgatataaagggctccatcgttcgtattgatcacatcatagccctggttgacggcttcccatgctttcatccagccggtgctccaaaggttcatctggacccctttgctgactaccggggtcttgcccggcttggcgctgaggcttccccagatgcggggcgtataaccgcgcttgagggcatggctgagcacggcgtttgcaaagtggcggtaatcttccttgtccccataaaattcatccgcccccacatgcaccacgccgcagtccgcgaacacgggacggcccaacttgggatccttcagcatgtattcatcaaaaaccttgctcaccaggtcgatcgtttccgggttggcggcgtccagcatctcgcagcggcgcttctcatgattcatgggccctttataaatgagatcaggccgcaggcgcgtaaaggaaagggcatgacccggcgtgtcgaactccggaacaatattgacgccgtactttctggcatagctgaccaggtcggcaaattccttcttggtataaaaaagatccttggctgtcaggggcgttccgtcctttcccttcattttggattccagacggaaagccgcatagctttccttgaacggatcatggccgttgtccacatagtgttcgtggaaaatatagctgttgttgatgaccaggtgcaggtcattcatcttgtaccaggccatggtgcggatcacgtccttcaggtaactgagggggtaaggcgtgcgcgcgacatcaagcatgaacccgcggagctggtagcgcggaaaatccacggccgtgccgcagggcacgctgccgggcgtctggcggagcatctgcagcagggtgcgcgtgccccaaaacaggccggtgggagccgccgcaccaaggcggacgccgtccctggcaatctggagccggtatccttccctgcccagattgccgcccttcaacagggaaagggaaatatccgccttcgccccgggggcgacaagcttgaccttcttccccagcacgtcttccatatccgccgcaaacaatttgcccagctccttgtccgggcatgctatggtgaccgtattccccagcttatattctccctgtccccccttccattgcaggatttccgggataatccgcggcttggggttgccctgggcggcctgaggagcctgcagcatgatttcataatccttgctgacggcttccttgccgtccttggtcaccttgaagctgacgttgacgggggtatctgaaataacaggggctatcttgcctttgctgttgacgagctgctcatagtcggcccccagcaatttaatctgggctccggaaacgctcggcatgggcagttgcttcgctccggctttcaccggagggatggaaagggaatccgcaatctgcttggcgtcctgccccatcacgggagacgcggcaagaacggcgatcatcaggaataggtttttcttcatgttttagtcttgtttaggaaaaggaaatgtctgatttgctccaaaaactacgcgcccgccgcccctttcttgcagagaaagggagaaaagcggaagaattctccctctctcaaccgggcgggacggacattccgcccaaacggattgccgcgcgccgggcttcatgaaggaaaaccgccggccaagagaggctttccctcctgttccaataaattattatcccaaagaacccgttgttggcaagataaaaaacgtggagccccgggctgcagggaaaaaagatgccgcacgacggcaaaacgcccccccacggcaaaaaacgggaaccggccgtccctattagggcggcccgttccggacaaaaaataaaatcaggcgcggatatcaatcacctctccggcgggaaagcgcaccttggcctcgcgggcataagcgtcatccttggcgcggtagcccagagccacccccaccacagagcggtacggcgtaccgtccaggcccaggatttcatcatacttggcgcggtccatgccgccgatcgtgcaggaatccacccgcagggcggcggcggcgctgagcaggaaccccacggcaatgtacacctggcaatccagccaggcatgcatcttttccggagccagagcctccacgtagctggtataaaaatcggcggaggaagccagtttttcagcggagggtcggcgcgtgaattcaatctgggccaggtaacggtccacatcccgcctggtggcgtcgcgccgggagcacagcaccacgtaatgggaacagtcctccacctgggactggttccaggaaacctcccgcaggcgagccttcagttccctgttggtcacgacgacaaacttccagagctgaagccccagggaggagggactgagacgcaggctttccgccagcgcatgccaggtgggctgttcaagacgggcttcaggatcaaattttttgcaggcgtaacgccattccagaccgtcaatatactgttccggggagatcatcatgcagggtgagacacgaaaaacggaaaaactgtttaaagaacctctttcaatacctcaatgcagcgggcgttctccgcaggagtgcccacgctgatgcgtatccattccggcaggccgtaaccgtcctgcgcgcggacgatgactcccctggcaagcatatcctggaacacctgcttgccccggcccactttcaccaggataaagttgccctggctgggaatccattccaggcccatttcccggaaagcctgctcataaaaacgcatgccttccttattattctccacagtgcggcgcacatgctcccggtcctccagggcggccagggcggcctcctgggccagaacatgcaggttgaacggagcacgcgccttgtgcagcatgctgcaaaccggttccggcgcaatgccgtagcccacgcgcagccccgccaggccgtaagccttggagaaggtgcgcagaacaaccacgttgcggccttctcgcacaaatttgagggtatccggaggattgtcggaaaactcccggtacgcctcgtcaaagaccaccagcacatgttccgggaccttcgccatgaaatcgtctatttcctgctgtcccactacggtgcctacgggattggtgggattcgtaatgaacacgacgcgcgtattctccgtaatagcggccaggaagccgtccaggtcatgcgtccagtcctccttgttgggcacttccacgtacgcggcgccaaacagcttggacatgatagggtacatggaaaaggcgtgtttggcggccaccacctccgcacggggattcagcagggcatggcagatcagttcaatcacttcgctgctgcccgtgcccactaccgtctggccgaactccacgccgcagaactccgcaatagcggaacgcaggcggaaagccgctccgtccggataaatgttcacgccggcagccgcacgggcaatcgcctccaccgccttcggggacggccccagaggattttcattagacgccagtttcacaatatcatggggattcaggcccagttcccgggccgtctcctcaatcggcttgcccggctgataagccaccaactccagcacatgctgatttgcgaaactctcaatactcatagcggcggaatgttaccgccattccccgtttctggcaatacggatttccatccggccggcccctgggaagatgacagccgtttagagaatctgcgctggcggaaaagtggaaaccttttccggaatttttccattcttcctgcaacgcccttctaccggagaaaggcagccgtccactttctccggcagatttccgcctgcttttcatgacggaccgcccaaatatgaaggagcacagccccggaattcttcaatgccccataaggtcaaaaacatttcccttaaaaagcgagacggcattccgtgacggacggtaaaccggccccctgccctcctattttttacggctgcggcccctgcgcgggcggctgcgcagggtctggtacccggccacgacaaaggcgaacgcagtcaccgccagaaaggaacggaacagccaggccagaagttcccagtaaatctcctgagtcatgcggaaggttttttaccggaatcgggaacgttccccaaatcttcccggaggcgtttgacggcacaggcaatcagggtggctttatccagctggcagcgttccatgttcagcgcgtccgcttccgcatcccggaaaaaatggaccgataacggcattttccccttgatttgaatttttttctgactcttttttttattttccgtcttcataaaaatcctttttttggtgcaataacggccttaacagcccttttgcgcccctacaatgcacctgaaacggtatttcagtcaacaaaaatataccattaaaatgactttatgcaaaaaaggttgaaaaatagcaccattttcgttacaaagggtgcatgagtgagaatcaggacgaactcaaagtgcagatcaaggcttggctgaaacagcagaacatttcccgcaatgattttgcggcggaatgcttcgtgtctcccaacacggtccgcaactggcttgccaaggtggccatccccaaagacaaggaagctctcatccggctcatgatggaaaaaacggaaagggagaaaaaactgaaagaggcggcaagagccaattggaagccctttgtcgtcatgctgagttccgaggattacaaactcatcgaagaagccgccagaagggacaacatgacggtggaggaatgggcggaagccaccctgatcaaggacgcccagaagaggatgaagaattattacgacgaaagcagccttccggaagatgtatccctggcggcggaagtaccggaggaatacggagctcccagacgttccggcccttcatcatctccgcccttttccacccgccgcaagccgcggcaataaatcctggaggacatggcatcccgctgatgtcctccctgtctgccggctgctgccaggggggtatggaaaaagcgtgtgcttttatgaaggcaaacccggcgggcaggtggcggcggttgttttccagaggaacacgaaccccggttggaatccggccaaattccttcatccgccaccttgccccagaaaaaggacaacggatgtaccgggagtcctttcacctggcaatccgctgcttcctggaacccgtttgcccgtggttctttaaaagctcccccctgttccgggcattgggttcccggcatccctttctgatgattgactcctccctgaaaggcccctgattggagaaatcgtttcatcacacgcactgcgccgctcttgccgccggccggcatgtttcacatgggccagatacggcagaaggaatggggcgaaacgtttcagggcaaaataaaacaggacgatggccgcaaacaccagcaacggcgtgaagaaggcgaacaggctggatttcatggcgggaggcaggaaaccgtaaatgggccagtgcagcatgaacgtcagaaaacaggcgggggccagcaacgctattttcgcggacaggccgggcaggtgcttttccatccagatgcctgcgtacataatcatcatgactcccagaagcatgccaatggccgtctctttccacagggggatcaggtcgacggaataaagcgcaatcagcacaacgggcataaaaatgctcacccagaaaaaaatgccgaattttttattcatcaccagatgaatgtcgtcaatccgccgggaactgagcgcaacgcccagcaggtaaaaagcacaggttccaatggaaatcgtctccatgtggtccggggccgtgttgaagaaacagaaaaagaggagcaccgcaggaaacagcaggattttgacgcggaccagaagaggcgtcagcaacgtgagaatgataatgtccctcaggaaccaggaagggccgatggggggaacggcatgggagtcatctgcggagaaaaggttcatgcccggaagaaagacgtcccggataccaattaaattctcaaggcggaaggaagcgccgtcatgaggcaggacaaggaacacgtacagtacattccagaacatgaacggaataaacagccagaaagcccggttaaaagccttgttccaggtgatgttcctgcccaggaagtaccctgccagcaccaggaaaaacggaaccctccccaggtaaaagagatggaggctcaccgcctggagaaagggggaggacaggtggacgtacatgatcagaagggctgcaataacccttgatacgtcaatccataagacacgttttgatggggggggggggggggggggggtaagcgtgtcaagaatcggaggctggttttgggagttatacacttaagcggggaaaaagtaatgcaggcgggcgtcaaagtcaagtatccggaaccttttcgggcatgggctccgcattggggcatccctgatttttttgctcgaaccggattcggagcttcgctatattggctcccgttatggcaacaccggattttcattatcaggatccttttcccatggaaaaggacgacacccaataccgtctcatcacgtcagactatgtgagcgtaggcgactttgaaggacaccccatgctgaaagtggaaccggagggactgcgcctgctggcagcggaagccttccatgacgtggcctttttcctgcgccccgcccacctgaagcaggtggccgccattctggacgatccggaagccagcgacaatgataaaagcgtggccctgacgatgctccgcaacgcggaagtggcgtccgccggcatcctgcccttctgccaggacacaggcaccgccaccatcgtaggcaagaagggccagcaggtatggaccggctgtgacgactgcgaacagctttcccacggcgtttacgacgcctatacccagaacaacctgcgctattcccagacggtggcgctggatatgtacacggagaaaaacaccggcaccaaccttcccgcccaaattgacctggaagcggtggagggcatgaaatactccttcctgttcgtcgccaagggcggcggctccgccaacaaaacttacctttaccaggaaacgaaggccctgctcaacccggccacgctgaaaaagttcctagtggaaaagatgagtactctgggcacggcggcctgccctccctatcacatcgctttcgtcattggcggaacctctgcggaaaaatgcctgaagaccgtgaagatggcttccacgaagtactacgacaatctgccgactacggggaacgaacacggccgcgccttccgtgacctggaactggaaaaggaactgcatgaagaagcgtgcaaactgggcctgggcgcccagttcggcggcaagtggtacgctctggacgtgcgcgttatccggctgccccgccacggcgcctcctgcccggttggcctgggagtctcctgctctgcggaccgcaacgcgaaagccaagatcacgccggagggcatctttattgaacagctggaaaccaaccccggccagtatattccggaagccctgcgcatgacctccagcgaagctgtctccattgacctgaaccgtccgatgaaggaagttctggcggaactgggcaagtaccccgtcaccacgcgcctgagcctgaacggcaccatcatcgtggcgcgcgacatcgcccacgccaagctgaaggaacgcctggaaaagggcgaagggctgcctcagtacatgaaggatcaccccgtgtactacgccggcccggcgaaaaccccggaaggctacccctccggttccttcggccccacgaccgcaggccgcatggactcctacgtggacctgttccaggaaaacggcggctccatgatcatgattgccaagggcaaccgaagccagcaggtaacggatgcctgccagaaacacggcggtttttacctgggctccatcggcggccccgccgccatcctggccaagaacaacatcaaaaaagtggaactgctggaatacccggaactgggcatggaagccatctggaaaattgaagtggaagatttccccgccttcattctggtagatgacaagggcaacgatttcttcgcgaaaatccgcgaaggatgggcctgcgccggttgcgggcattaagcctgacccggaaacaaaatgattcgcggccggagtccttcggggctccggctttttaatgctccggtctcgctccttcctcccggttcggacggcgtgaatatccggtatgaccaaccataaatgacggtaagggtgaatccttaaatcatcgtaagggtcaggaggtggggaaagagaaagggtcaagtgtcccacatgggacactattttttttcaggttcgcgggtggagaagcgcatgagttccgcctcaaagcggagcggaatgtccccggtggggccgttgcggttcttggcgaggtgcaggttggcctgtccggccaactgctgccgctggtcctcgtcgtcggcgtagtagtcggagcggtaaagcaggccgatcatgtccgcgtcctgctcgatagagccggattcccgcaaatcggacatgcggggaatcccggcttctttcccggcgcgcgtctccggtccgcggttcagctgggccagcacgacgacgggaaccttgagttccttggccagggctttcaggccagaggatatttccgcgacttcgcgttcccggctgttggccgcctgtttggagtgggaacgcatcagttggagatagtccacgccgatgacggccaactgaaattctttccatgggaattcagcgcatgctggaatctcccgttgacttccagcgtcaggaccccgaattttacaatttcatcaaatcccagttatcatgattttaacccgttccgaacttgccaaaatgactgaactttttgacgcgcaggaattgcctgacacgttcccggacgacctggaattttccttcctggaagtcctggccccgacaatgaccttgaaggactatctcgccatgccggagcaggagcggcggaaatggtggattagcagccaaatcatggagccaatccccctgaccgggccggacccggaaacgggggaagatctctttgttaccggattttatttcgagcctgtagcccctaacatccctgaccgcatctattaaccatgaccaaagcaaagcaactcatccttcccatttcctacccggacagcggacgctggtatgctcccgtccggaaaatcaaaatcgacgaacggacgtacgccctaaggatgggggaacctgtccagctgggtaccgtcaaagagattgaaaaagaattccgggtgggccgccgcgtgctggcccgcctggcggacattggcgtcattgagcgggtgcgcccgtctccttttcaatctatgtactactttgcggacattgccgcattccttgagcggacgcggacggccccggcgttctggtcctccgtccgccgggaggcttatctgaacggaccttctccgcaagatgcctccctccggttgtaatctaacattttttatcctggccgcggcgtgaaagccgcggcctgttttgtgccatcatgcgagcatgttttcacgttcccctttcctgtgcggcgactccctttccctgatggagtgcatggacaacgattgttatcacgccgtcgttacggacccgccgtacgcttccggcggcctgacgacggcggaacgcaaggcttcccccgcccggaaatacctgtcttcctcaaggtatctttcttttgataacgacaccagggaccagagcacccattttttgtggtccgtcatgtggatgcaggaggcaataaggatcacccggcacggcggctggctgatggtcttttccgactggaggcagcttcctttgacctcggacgccttgcaggtggccgggtggacatggcgcgccgtcgtcacctgggacaagacggaggcttgccgcccacaccagggcatgttccgcaaccaatcggagtttatcctcattgccacgcgcggcagcatcggcaaggagcaggaccgcccgcgcgtgtttccggctggcgttttccggcattatctcaagccttccgacaagatgcacctcacaggcaagcctgttccgctcatgcgccacctgatgacggttcttcctcccggttcccgcgtcctcgaccctttcatggggagcgggacgactcttgttgccgcccgcgacctgggacacgtcgctcacggcatcgacctttccccggataatgttcgcattgccgcggacctcctgggcgttcctgttccctgaccgcggccagcccgcggagagttcgccgggcttccgcgagacacgcgcggaccactggcgggagtgtctcacatgggacaaatgacccttacgatttttcaaaattgacccttacgggcatttatgggcgtaacttctgcctcgccccttccattttcccctgaaacgtacgtattttcaaccgttttcaagcttcttcaagcgaattcaacccttttcaagcatttatggttggtcacaccggagaggaaaacttctggtattcatcatacgcatcttcacgcaaacaggtaataaaccagcatcagcgtcagattgacgccggcagccagcaacaccccgcccggcctcaaataccgcgcctttccaagaaaaaccgccagcaccgcaaagacggcgtacagggagatccacatcaggaaaaatgctgtcaggctctgctcattccccaggccggcctgggccatgttcccgccagggaaaagaaacggcaacgccggaagcacggcgtaaatgacatatacccaatccctagctatcaccctgaaagagaccgccagcggcttcctgccaaacagaatattacgggagcaggcattccgcgtcttttcctccctcagagcgcagggcaaatagaagggaagaagcatcagcgccaggacgggcccggcatacaaaatggcggtcattcccgctacgaaagcaaagaaagcggcaaagaggacaggcacgcccgccatgagcaggaaaagaaaggatgtgctacgctccgccttctcccccattttcaggaaagaccatgaaagataagccatagggtaaaaatatggtttttttgaagtctgccagaaatcgaggccatgcgcaagggaaagccgcccaaaaacatccggagcagcatagccccatccctacgtacgagacaaaatgagaaccagacagactctgattgggattgccccgcacccgcgcccacgttatcctgcctccatggtctaccgaatttgcaaatccatcgaactggaaagcgggcatcttctgtccaaacatcccggtaattgcaaattcccgcatggccatacgcgctccgtggaaatggtgttccgagcggaaacgctggatgccaatgacatggtgttggatttcaaggctatcaagcagatgatgggggatttcctccagcagtttgaccactccctgtgcgtgaatacggaggaccccaacttcgccgccttcgtggccgcatacggggagcgcatcattcccttcgaccgggaagaccccaccagcgaggtgatggctcgcgtcattttcaatgttgcccggcacgcgctggaaaaagccagggagaaccccggcgaatatcctgtgcgggcctgtgttgagctggaacgcgtgcgcgtgtgggaaaccagcagttcctgggcggaatacggggaataactgaaacagcgcgtttcccgccgggcggaacgctccgcaaagattcccggccccgtggaaagcacggccgcaacgcccccccccccgcaggttcatcccttaaaagggattcagggaaatcatgcgtttctgcgtccagtgcccgtaggcggaagaatatacatccgtaatttcccgggcccattcgtcaatagtgcgctgatggtgggcgtattttttaaaatccttggtgtccacgcccagcagggagctgtggtcttcctcataatccgcaaattcggaaacgatgcggccggactcatccctcaggcggcccgccatggcaatgtgccctttcttgatgaaccgtttgaccagccctccccccttgatgccgctcagcgccgtgacaaagatgccggccctggcattcgtgggagtgatggaaatgatggcgagttccagcgtataggcccccctggttcccggaggcaccatttcaaaatgcggattttcggcaacctccttttccattctggttgcaacgctcttccggaagtactccgccaggccgcgcagggcatcaaacccctccgcggtatccggccttacatccatgtgctccgtatccaccggaacaacggccatcatgacttttttgccatccacgccgttcaccctgtcattccagatttttttatcatcggcattccagtacgcgtcaaagggaatatgggaatccttattttttacctgatgagtgataaatcctgtttggggaacatgtttgaaattattggaacaagacactaccgccatgcagccgagcagcacgagagccatcagggaagctgagaataaaaaacggtgtttcttcatatcaaataattccatatcaattaattggcagaaccgtttctatcatggcccggcatcctctgtcaataaaacctgcgggtgaacatccggggcggcggtcctcccgccgtgcggaagaggccaaagcgggaattcctagtcttcttcccccatggggcggtatttcacggccagtttttccaggatattcagagccctggaggcgcggctgcggaaggatttgtaatcccgggggtcgcagtcgctccaggcgcgttcggacagggccagggcgcgcggccacaccatatattccaccagacccatattgtacaggtattccgtccagatgttcgcctggaggccgcgcaccctggcggcttcctccggggaaagttccggcaattcatagccgtacacctgcttgagcggaataaggcccccgacggctttcggctccgtggacgcggcggactggtaatagtcaaaatagaagtgggaacacggcgccagaatgacgggatgccctttcctggccgccgccgcggcaaagccgttgccgcgccacgccatgacgaggatgcgtttgtccgcctccagttccccggcttcatcccagacaatggcttcatagccgcccttcctcacgtagtccgcaatccgctgcaggaaatcccggctcagggctttaagatccttctccctcaggctttttaagcggttctggcaataccggcattttttccatgcctcggcagacacctcgtcatggcccaaatgaatgggggagccgggcggaaagacggccttaagttcatccaccacgtctttcacgaagcggagcgtttccggacgccccatgcagacggagtcccgtccttgtttcccctccacgggaaagtccacgccgtcgcaaatcaaatccccgtaggcatgcatggccgcataggaatggccgggaaggtctatttccggaacaacggtgacctggcggctgcgcgcataggcaatgatctccctcatctgctcctgggtgtaaaaaccgccgtaggtagcttccgggtcatgctcccggatggcgagtttcacttcccgccagttccactctccgtcagcgagcggaacgcgccaggcgctcatggaggtaagcagcggatattttttaatttccaggcgccagccggggccgtccgtcaggtgcagatggaggcggttaagcttgaacagggacatggcgtcaaccatgcgtttgacttcctccacggtgaaaaagtggcgggaaacatccagcatcatgccccgccattcaaagcggggaatatcccggagggaaaaaacgggtacggaaaaaccctccccggtccggttggcgttcaacacctgaaccatgctctgccacgcgtagaaaaggccctgggccgccgccgctttcagatgcaggatacccctcccttccctgtcgcgcaccaggcgggcctcatacccttcgcccgtccccgaggggcttccctcaaccgaacaaacggcatccgcagaggctttgtcacgggttatggagaggccggacaaaacgccctgggcgttgagcacattcaggagggcttccaccacgggaacatccttttccggcgcatagaccgccagccgctgcgggagatgagccacggaggaccggtcagacctgcatgcggaaggcgcggggagcagcacctcctcagccggcagcgtttccgccatacccgtgcccggcactccggacagagccagccatgcggccagccggaaacaacgccccttactcatcatgctggaagtacggcctcccctggtctcttctttcaacggaaggagccttccctcaggcccctgtgttccggaaagcaaaggcgcggccgtattcagccgcacctgccagtttccatccttttttacatttaccttcgtccgccaaaaaggccgccgagaccgccacctaatccacccaggcctttcagacctcccaaacctcctcccatgccgggaaagccgggcaccttgccccccttccctttcatggaagccatctgcttcatcatggcgcccattttacccttgccggacatcatcttgcgcatttcggaaaaattcttgattagcttgttcacctccatcaggggacggccgcagcccgcggcaatgcggcggcggcgggacggattcaacaggttgggattgctcctttccttggccgtcatggagagcacaatggcctccatgtgcttcatccgcctggggtccagggcgccttccggaagctgtttcttgattttgccgaagccggggagcaggcccagcagtccttccagcggtcccaggctctgcatcatcttcatctgatccagaaagtcgttgaaatcaaatttgccggacatcatgcggtccatggatttggccgcctgctcttcgtcaatgcgtgcggcggcatgctccaccagcccgacaatgtcgcccatgcccagaatgcgatccgccatgcggccggggacgaaggggccgaactggtccagcttttccccctcaccggaaaatttgatgggcttgcccgtcacggaacgcatggaaagggccgcgcccccgcgggcatcgccgtccagcttggtcaggacgatgcccgtcacgttcacggcacggtcaaaggtctgggccacattcacggcctgctggcccgtggcggcatccgccaccaggagcgtttcccgcggcgcaagaaaggagtgcagatggcgtagctcgtctatcagggcttcatccacttcctggcggcccgccgtgtcaaaaatcatgacggtcccgttctgggtccgggcccattccagagcctcgcgcgccacggccaccacgtccctgctgccgggagcgggcttataaacgggcactcctatttgttccgccagcgtggccagctggtccacggcggcggggcgcaccaggtcgcaggccaccagcagggggcggcgcccctcgttcttcaggcgcagggccagcttcgcgctggtcgtggtcttgccggcgccgttcagccccactaccatgattctggcaggatccgtcaggtccagccccacggcgtccccgcccagcagggcggcgatttcatcacggaaaattttgacgatttgctctccgggcttgatggatttgagcacttcctgccccatggcccgttccttcacgcgaccgatgaattcccgggccacgccaaactccacgtccgcctccagcaaggccagccggatgtcgcgcagggcgtctgcaatatttttctcggaaatcttgcccaggccgcgcagcctccggaacgtgttatccagtttatctgctaaaagtgaaaacataatcgtatgatgcgccagactgtgccacatttcccccttcccgtcaacaagcgcgccctgcatgggacatgatgcttgacttgccgggggcttcgccccatcttttcccgcatggcaccctttgacctgaaagaggaaattttacgcctgaaagaagaacgcaacgccatcattctggcgcacagctaccagaccggggatatccaggacatggccgactatgtgggcgattccctggggctggcctacaaggcgcagaatacggattgcgacgtgatcgccttttgcggcgtccatttcatggcggaaaccgccaaaattcttaatccggacaaaaccgtcattcttccggatgccgatgccggctgttctctggaagcctcctgcgacgccggtgagctggaagccttcttaaaagaaaacgcccataaaaattactatgtagtggcgtatgtgaactgctccatcggcgtcaaggcgctggcggatgtaatcgttacttccggaaatgccgtaaaaatcgtctcccaggctccggaggatcgccccatcctgttcgtcccggaccagaatctgggcgcttgggtaagccgccagcttggccgccccctggaactgtggaacggggcctgccacgtgcacatggagttcacgcgggaccagattcttgccctgaaggaaaagcaccccggcgtgccggtggtggcccatccggaatgcacggaggccgtgcgcctgctggcggaccatatctgctccacggaaaaaatgatcccctattgcacggaaaaccccgccaaatctttcatcattgtgacggaatccggcattctgcaccgtctccgcaagctggtgccgggcaaagaattcattcccgcgcccacggagcaatgctcctgcagcacctgcccgtacatgaaaatgaacacgctggaaaaactgtacctggccctccgggacctttctcccgccgtggaactgccggaagacctgcgcagaagggcggaagccccgttgctgcgcatgctggagcaatcccaatcctgacccctgcctttcctgcatgatacgcctttcagaccacatcgcggccgctggcggctggctctccctggaagctttcatgcagctggccctgcaccacccgcaggaagggtactactcctcttccattgaaaacatcggtcaacgcggggacttttccaccacccccacgctttcccccatcctcgcaaaagctattgtcgctcactggaaagaagcctgctcccgctgcggcaggcggctgcccctgctggaaataggcgccggttccggcgccctggccgtcaaaatcctggagcggctgggattctggaaccgcctgaatacggactacgtgattgtggaatcttccccacgtctgcgcgaattccagcaccttctgctgggaggccgcgctaaaatttactccaccatggaaaaagcgctgaaacactgcggaggcaaggcctttattttctccaacgagctggtggatgccttcccggcgcgcgtatttgaatacacggaacaggactggaaagaagtagggcttgtcgtgaaaaacggagccgtccgggaagaactgcgccccgtccggcagcagccgcttttctcccatatgctggaatacggctcccagccggggcagcgggtggaaattcacgactcctacgcgcgctggtttacgagctggcttcccctctggaacatgggcgtcatgacggtcatcgactacggggatgaaatggagcggctgtactatcgccgcccccggggttccctgcgcgggtacaaaagccaccaggtgctgacgggggaggaactgtaccgtaaccccggcctcacggatttgacctgtgacgtcaattttacggacctgctggaactatcccgcaactgtctggaggaccgggtcactttcatgacccagcgggactacctgctcccccatgcggaaaacacgccgcaggatgcctttctgacggatgaatacggtgccggaggacacttccacgtactcattcaggaacgccagcggctgcaaccggaaggcacccagtaatccaggagaccgtacttggaaatgccggacgaaacctaagcaggccccgtccgacagcgacggccccatctttcttcgagaaagaaaaacattgattacaggaattggactgatgcccggaagggatggcctcctgtcaagggctcagcatgagaggaaaacattttctaacaaacagacaacattgatgtctattaagggaatgcactgaacgtaagaattataatattatcttttcgtgtaaaataatgaccatcttttataaaaaatcaaaaacatacaaataaaattctatcgacaccgacttcagatcatactattgataaaacgatcaggaaagggcggcccccctcgcttccttcattacccccgactcttgaatacctgatgaatccgcctcatcgttcctcctccgtccatcgttctgccgttcccggctaccggaaatggtactttggagccggcggcagcctcggcaggcggggcatggaggcagctccggagcccgacccgctgccatttgaagaaatccacgaacacgctgaaatcactgtgggaccgccgagcacgtcggcggacgggtacagtgcgcacgggacattcaccatcccggaaggagcggagggcaaaaaactctacggcacctgctcgctcttccttggggtggacgactggggaagcctggaggtaaaggactccggcggcaacgtggtggcgcaggtggatctgaaggaaaacccgcagacggcgggcgaacagggcgggcacaaataccacacggggaccggcggggcgcagctcccctccggcacctacagctgggaagtcagccagaccaacatcgactacaatccggcaagcggcaacacctccatctgcaactacagcatcgacgtggtgccgacggaaccggggggcaggaaagaacccgaaccgtgtccctgcgagggagacacgtgcgacaacagcggcggaacgccgccctccccgccgcagtcccggtcgggccctgaggcgggcatggaaagcggcgccctgggaaactacagctcggcggggtgcagcgtgacggcggaaagcacggccacgctgatgtactggtcctgcaacttcggagcgttccgtggacttgggggccttccggccggaagggtggaactgaggggtgaacaaaacgtctccggcctggaaagaccctcctcactggcctacaaccatcccctgaacagccgtctggacgtgccggaagggggcattgtccccggagcacggtttaatctggtgcagggagaccgggtaattgccatgcgctgctacacggacgggtccgtgctgcccatcggggtggacacgtcgggcggagggcgtgcggcgctggccacggtggaaggacaatcctgcctgcgctgggtggtggaagacggcagccaatacctcttctcggcggaaacgggaacgctcctctcctacaccacggcggacaggcaggtcatctccaacgcgtcatcctatctggacgtcaggcatgccggagacggctcgctgaggcaaatctggaacctgtgggacggcctgctcaacgtggaaaacgtcatctccacgggctacgtcatcgcgctctatacccctgggcaaatcaccggaacggacgaacagggattttataccgttacgggcgctcccttgaaaacatttattctttccctggatgctgaggaaaagttcaccatcacggaacaggcgcctgccaggcagccctacgccgtcacctggtggaacgacggcctggcgtggaacatgcggcagggcacgggggaagacgccctcacgaccctccgcacgcgcacggagctggaaccggaaaactcggtctggcagctggtcacggaaatctccaaaaacggaatcgtggcggcgcgcacctgcgccatctaccagaccacggacgtgggcgacctgctgctcacgctggcggaaggctacggaagcccggaggagcaaaccacgcaatacgcctacgaccagtgcggacggctcagaacggaaacggccccggacggcagccagactcatgacgcctatgacctctacggccgcctgctcagccgggacgaaccgtgggcggaaagcggcaggcgcatcacgcgctacacctatgcctgttcgggagaagccgacttcagcaacgaacccgccacggaaacggcagacctgcttccgctggaaggacacgtcaaaacgctgacatccaccacctggaaatacacgacggccaaccacatcaaaagaacggaacggcgggtcacgggcctgggtgtggcgggcacgcgcctgacggcggaggaacaatggctggccggagccgccaacatccatgcccgcggacgcacgcggttcagccgggacctcgacggcgtgcaaacgtggcacgactacgcggccacgacggagcacggcgccctctacacggaaacggtggaaacgcgcatcaacggagaagccgtgccgggacaaagcacgcgcgccgtcacctggatcacggcggaagggcagcgcgtcagggaagaaaactacctcctgctttccaccgggcaatgggcgctcacgggcagcgccgtctacgaatttgacacgcagaaccggtgggtgaagcggacggcgggcaacggccggctcacggaacgcgaactgatgtgcgacggaggcctgctgtgggaaatcgatgaaaacggcatcaggacggactacgcctacgacacggcgcgccaactggtggaagtcacgcgttccgccgtgatggacggggaaaccgtcatcacgccggaaaccatcaccacctacgcccgggatgcggcagggcgcgtgctctccacgcgccgggacacgggggcgatgaccacgcaggaaagcgccatctacgacctgctgggaagaaccgtatccgttacggatgtcctgggccgggtcaccgcctacgcctacagcggggacggcctgacggcgacgcggaccgccccctccggagccacgttcgtcacgcgcagcgcgccggacggaacggtgatggaagaatccggcacggggcagcggcacgtcatctacgccatcgacctggtcaatgacggcgtgcggaccttcacgaaagccgtgtccggggaaacgcaaaccgagctgcagcgcagcattgtcaacggagccggggaaaccctgcgcacgggcatccccaacaccgtcggcggagtcatttacacgaggcgcacctacaacgccaaggggcagctggtcaaggaacaggcggacgcgggcaacgcggccacggcgatggccccgaccctgtgggaatacgacgccttcggcaacagaacgaaagaaacctggaagttggccgatccggccaccgtgtccaactcgcgcatcaccacgtggagctacggcgcggaacaggcggaagacggcgtgtaccaggtcgtcacggcgaccaggaacaacggccggggaacgacctgcgacgaaacgcagaaaacgcttctttcttccctctcgcccacgctggaaagcaaagtcatttccatcgaccccaggggaaacgcttccgaacaatggagcgaatacggcccgggcgccgtccggacgcagaaaagcagcattcccacttccaatgtcatagcaacggccacggtcattgacgggttcaccaccacgcagacggaccatgcgggcgtcacggccacgcagacccgcgcctacacggaaaccggcgtcatctacgccaatacggacggccggggcaacacgaccacgacgaaaaccgatatcgccgggcgcaccgtttcggtgacggacgcggcgggcaacacgacttctaccgcctacggcccctggtttgaccagcctgccgtcgtcaccaacgccctgggcaacacgacctgctacggctacgacctccggggccgcaacacggcgcaatggggaacggggacccagcccctgctcttcgcctatgacgaagcggacaggatgaccagcctcaccacgttccgggaggacgccggcgacattaccacggatcctacagggcgcacggacggagacgtcaccacgtggagctacgatgacgccacgggcctgctcatccgcaaaacctgggcggacgggacgcatgaggacacaacctacaacgccctgaatctccgctccacgctgacggacgcgcggggggtggtcaccacctggggctacaacttgaagaagggggtcaacaactccgtctcctacagcgactccacgcccggcatccagtatgcctacaaccacctcaaccagctgacccaggtcacggacgcttccggtacgcgcgtgctcacgtacaccccctgcaacgaaccggacaccgacgccattaccatcgaaggagtctcctgccagctccaggaacactacgacacttacggacgctcctccggctataccctgaaacagggaaccggtgtcctccaggaagtcagccagggctatgaagccgacgggcggctggccagcgccggaatcaggcacgggggaacggagcaacgcttcgcctacggctacctggcgggaagcagcctgctctccagcctcgcgatgcccgacggcatcgtccgggaactttcttacgaacagcgacgtgatttgctcagcggcatagactgccgcctgggggaaaccgtgctggtctcccggacccagagatgcgacgctctggaacgcccggtcacccgcacccagcggcggggaacggagcctgcacacagcgacagcttcagctacaacggcagaaacgagctcaccggcgctgccctgggcgccgccccctacggctacagctacgacaacatcggcaaccgcaagacggcgcaggaaccggcccaagaactcgcctacgcggccaacgggctcaaccagtacaccggcattgaagaaagcggggaagcgccttttgtgccgacgtacgacgcctcgggcaaccagaccctcatcaagacgtcaacgggcgtgtggaccgtggtctacaacgcggccaaccgcgcggtgagcttcaccagccgggacggcgcgacagtcgtggaatgcggctacgactacctgggacgccgctacatgaagaaagtcacccaaaacggcacggtcgccagccacgaacgctacctgtaccggggctatttgcagatagccgccttgaacatgctggacaaccgtaacgtgctccggacactgttgtgggatcctctggaaccggtggccacccgccccctggccctcgtgcaggacgcttccctttactgctacggcgtggacttcaacaagaatgtgtcggaggtcttcgatagagagggagctgttgcggcagcttacgattactccccctatggacaggcggcttccacgggcagcctcgtacaacccgtccacctgtgggatatcaaaagcagcaatgtcgcagaactcatgcacacaacggctggaatcctcattatcatatttttacagttaatcagtctcctagagtagctggttgccggtgtttcgataaacgtactacaactacaatttcgaacaatccctattatcctgaatatacaggtgacctaccaaggaggaattgaaaccatcaagtaacaaaaattatggcaaattatttttcaggagaagaaatcaaagttggagatctcattactacagataacggacatgacaaaaataaagtaatgaaattaatagataacacatatttaatgcaatcttatggtttagattgttttggcgcattattatctagcagcagcgctaaaggaatgatctttgtatcgtttaaagaactttcatctccagatacaaaatttataagaaggaaaacaatttaaataaaattatgaaaacatgaataatcattttaacagatctttcttttctatcaggaagcaatttgtcatttgcagaaaaggagcaaaagaacacacgtcaagaattttcttttggagatgatcattgtgtgactagatttaatttttttgaaaactattcaactgattaatacggaaaaatatacacattcagtattcaatttctcaagactggatatggttaaatggaatatttgatagcagaaagtataataaccgaaaatataaattatccttctttcccgcatgagtatgaactcatcataaataattgggaaaatgtaaaaaatagtgtgaggaaataaaaaataatgattattataaatcttctgcttttaaaaattgtcatgaatgacatgattgcaatatgcaatggattttttaagatatgggaaaaatagttttagtcaaaaaatataatatattctacggatttttattttctaattgatgcaatagcaagtctttcttattctgtattaagagctatgatgccctgggacacgcaaccatacgcacgcagtggcggggaacggaatccgtccacagcgacagtttcagttacaaggcagaaacaaactcaccggagttaccctgaacaccacccctacagtacagctacgataacatcggcaaccgcaagacaaacgcaggagacagagaaaaaatttataaatgcctattcaattttatacatcttcacgaaattgttatgaattaagatttattgcaacaatatatcgccatccggtatacgacgaaactttcgaaatctaaaaaatcatattatgtcaaaatatataataattcctattattttcacatcaacaatagtttatggagataatcaaaaatttaatgaatatgcaattttttgcgaaaaaatgattgtcacattgcagagctgcacggatgaaaaatccactttttcacactcttccgaatttcctattattttatatactgttttaaatgaaaatcctttgaaagatttttttaaatctcaaaagggagctttatatcatattatgctattggcggagatagaaagattgaaccatcacaaatggttcaatctttcctctatgaaaaatcatgttaatcaaataaaatcaaaaaataccttatgcaacggcatagaggatccaagttctgctgtttccgccaaggaaaaaattattaattacgtaaataatttaaatgataataaatcagatatactctatttaatttcatatttattggatatatacaaaattaatgatttggaattgtttatgaaaatcatgtcgatatcagattgcgaattgctcaaaaaaatagatatgatagaaaaaaagattggttctttacaaattaatcatctggaacggacgacaatcaaacatttgataaaagaaattcaaaacaaatataaaatacatgaaaatatttataatgaattaagaaaaaaattaaacagtaacatagattgattcgtatcaagaagaatttgtatatgataaaattgcttctccgagagaaatcatgcttgtctccagcagcctgagctatgatggcctggatgccgtcccctcctacggttacagctgcgacaacatcggtaaccgcaagacggcacaggaattggcctaagaactctcctacgcagccaaccgcacggcgagcttcaccagccgagacggagcgaccattttggaatgcggctacgaccgccaggaacgaaggtacatgaagaaaatcaccgtcaacgggacagtcgccagccatggacgaaactgtaccaggactatttacagatagccgcctcttgactgccggatgccgaacaaataaaatgaataaagagaaccctatatttgttttcccggtttatcataacaaataccatgcttgattttctcgttttcctgctggatatcccgtcccttcttgctgatttttctcctcgcgccaagcataagggagaatcaccgtactggcgtttcatggggctttttttactgactgcagaactggttattctatttttatgggatattacggaaagcccgccagctcttgtagcctgtattactttgggcctctggctgatcgcgcacctctccatccgcgccttcaggaacgggaaaaacgtaaacggcctctccgtccgttccgctccgccattttcctcacaggcgccacaaagaaatgaagcccctaccccgtatctccctgaaagggaatagctatataatttatttattatcaatcattttaaaatatatacccggatttttgtcatacaaatttcttctttttgaacggatgctcctgtccgggactctaacctgcatcagcaacaaaccgggcggcgggaggtagagagaccgccgcccattatggggagttctgagtttcataggtaatatagttggataaaaaacccgcacgggggaaaccctgtgcgggtttattcatcccccctcccggaatgccggaaaacagggccggaacaggccgcagaaaatcatggctgaaccaaattaaggcttgagagttgaaggcatctcgctaatctggcttcagcaagaatcatctgttatcatggtcaccacgaacgaaccgaatatttacgaaacgggagtactggactccaatgcggaaggcaattttgtctataccaccctggacgccgccatcaactggattcgtaaaaattccctttggcccatgccgatgggtctttcctgctgcgccattgagttcatggccgtggcctgttcccggtatgacctttcccgcttcggctcggaagtgacacgtttttccccccgccaggcggacgtgatgattgtagccggcaccgtcacttataaaatggccctggccgtccgccgcatctgggaccagatgccggaacccaagtggtgcatcgccatgggcgcgtgcgcttccaccggcggcatgttccgctcctattccgtactccaaggcgtggacaagattcttcccgtggacgtttacatttccggttgcccgccccgtccggaggctattctggaagccctgctcaccctgcgcaagaagctggatacccagcagcccgcacgcactttcttcaagaaggaagaacctcgcgaagccaacgctcccgtcccggtcaacacggaaatgccccttgaataagttttttcaaacgtttcttccgttcacttttaccattttttctccatgctttctctagaatcacagattaaaaccgccgcagacaacgcccaaaaccgctttgggaaagacatcatcacggaccgctacgaattccgcggagatattacgctgaccgtcgcgcgccaagccgtggcggatgttgtccgctggctgcgggattccgccgggtttgatatgctggttaacctttcttccgtggacaatatgggggaaagcccccgctttgaagtcaactacacgctgacacagtcggaaacgggagcgaacctgagcctcaagacgaaggtggacgatggcgaagaagtgcccagcgtcacagaaattttccagtccgccaactggcacgaacgtgaagcatgggacctgatgggcatcaagttctcaggtcatcctgatttgcgccgcattttgatgtgggaaggttatccttatttccctctgcgaaaggatttccctgttcaaggcgtacctactgaactgccgggcgtcgcctttacggaggcggctcccacccagggagcgccgttcgctacggaacaaggccgctgccccagtgcctgccgcgaaccccggtcccataaattctagcccattttccagccccgcaaggcggggtcccacccatgacccgactcatcctgcccatatgcatcatcagcctgctcagcggctgccaggacgccaacccggcagagcgggaatggaaggagcagttatataaaaacctggccatcgtgggggccaggaactggattgtcatcgcggaatcctcctttcccgcctacacgggaaccggcatcagaaccatggtttccgacaagacgtcggacgaagtactcctggatgtgctgaatatgctggaagaggaagcccacgtggtgccccgcatcatgatcagctcggagctgcgcagcgttacggaggactatgctcccggcattaagcgctaccgcaacaatatcaataaaatgcttcctgggcgccagcattttgaactgatgagccgtacgatcaattccctgatcgaagacgcggccaggcaattcaacgttctggtcattaaaaccaagacatccctgccttactccaatatttatattgaactggattccgggtactggaattcggaatcggaaacggtactccgcaagtctctggaagccaaggacgccgccaaccgccgcgcggcccaggacagagtgctggacgtgcccctggttccgggagccacgcctgcgccacagggcaacaaggaaaatccgccaatgccgggagctcccgcctcccccgcagacaacctgccggagctcccgcgggaaaaccgccaaccggcttccccctctggagacaaggcccccggcgtgcctccgcctcccatcagggatcctctgggaaggaaaaccgccattgccagattttcatgaaccatcatatggacaaggctacagaagaacgcctccgcgcagaggcatgggtaggggacgccattttggcgttgtacgtcagggaatggattctggcggaggaaggagcgatcaacggcaagcttttcgtagaattcaccagcaatgattttctgcgccgcaccggcaacgccacaggcgtggaagcggagataggccgcactttcaaagcgggcggcctggaagcagcctatgcatggattgagcatcatttgaagccccgcatggaggaacgctggcacaccctgcgcagaaaagccctccggtaaactgccgccgccatgcccgccaccggaacacccctgccttgggaccgtggcaacggcccctgcgtgatggccccgccccatttgaggggctgggcggaagaggccgccgcctttctttccctccggggcatggacggaatcacagccttcgccacctccggctcttccggttctccgcccaaagccattttgtttacccgccgcgccctggacatatgcgcgcgcggggcattggaacatttacatgcggaaagcggggactggtgctgcccgctgcctgtatggcatgtggggggcgccatgatttacctgcgcgcggccctggccggaaccgccgtccatacgctccgcggaaagtggtgcccgcaggcttatgccgacctgatgaaaagttccggagccagatggtcctccctggtccccacgcaggtagtggatctggtcagcctcggcctccgcgcgccttccaccgccggatgcattatcgtaggcggcggcgcgctggacacggagacgggacggaaagcacgcacccttggctggcccgtagtgcagagctacggcatgacggaagctggctcccaattagccacggcccttcccggagattccttccatacggaccgcctttcccttctgccccattgggaagctcagacggacaaaggcggcctcctgcgcttccaggggaaaggcaaattgttcggccgcctgctgacgcaggctcatggagggttccttctggaaagagtcgctccgcaggagtggtggagcacccgcgacctggtgcgcctggaagggcgtttgctgacctttctgcgccgggcggacagacttgtcaaagtcctgggggaactggtggatccggatgccgttcaggacgttttgcgccgcagcgtcccggaggctgtcgtggaggcggttccacatccacgtgccggaatggaactggtcgcctgcggcccttccgctgcccccctggagcaggcctgccgcgagtggaatgcgtcggccccaggcccccagcgcatccgcgccgtcatggaaacgcccatccccctcacggtcatgggaaagctggacagaaaccggctgcgctcccagttgagcgatcatccggaaaagttgaagggaatttactaaaaggtcatcttccggggatattcatcaaaagaatccggacctgatggaatgaagaaatacggcggggttggaatccccaatcccttgcccacttcattcatcccgtctcccaggaagccattttcctccgccttgcgggcttccgcacgcgtcttcggaaccacccggtcccactccatttttttctttaaaaaaagaacgtgacatgaccaataattaaacattcagacacgtgaaaaacgcttgtagggcagaggtttttcctgctagaaaagagttgacccatgcgagcccgtcttttgcttattccctttattttttccgttccggcttatggccaggacattccgtccgccgcagcggcaaatcctcccgggcaggtgaaatacgctccggtccgggacctctcccaactgcctatggacggcggctggacgtacggggaagtgctggacaaagccgcggctggagacttccgtgccaatatgctggccggggaatactggatggggctttattacctgaaccgtggagacctgccgctggcctgcctggaacatatgcagcattttttccgtgatgcggccacggcatccggccatccggcacccaagctcatgatgacggatccttacgggattttcgggattttcaaggcgcaacccatgcaaccggaacatgcggaatggctggctgcctgccgcaagcttgcggaaaagggagacatggatgccgttacggccctgtacaccgtcacggatcttccggaagccgagttgagacgctacctggcccccctggaaaagaaggccgcttccggcgaccaggatgcgctggcccagctcgctttcatcaaagtggattggctggaggaaaatcccgccaacgttatcgagaccctgaagcaataccggaaaaacgccaaaccggttcttctggcgcggataggggaactggcccttgccctggacggcaaggacggcaggggatggagggatacggccattcaatccctttcccgggctgcggaaaaggggcacgcgggggccatgcggcttctggcggaattgacgaagggggccgcaccggcacaggccggaaagcttttggcggaactgcgctccagaggggatctggaaactctgctggcggacctctccgccggcatgaaggaaaaaacagggggagggaaaagctccctcctccagcctttgttcgagcaggccaggaaactgggcagcaataacgcctgtgcctggtacgcccagttaatttccgaagcgcagcccccgcaggaacaggagctgcgcaagacggcccttgatctgctgtcccttcatgacgaacggggcatgccatacctgaaggaacctctttccttcccccagaaaaaactcaaccagcttcccccctacgccaagacgcataaggagcttgagctggcctctcagcttggggacgcagattccagcgtacagttgggcgagctgtggaaggaggaactggccaatacactggattccgtagggaaggcccatgaagcgcgggaaaatatgcgcgtatggtacaggcaggcggcggaggaaggccaccccctggccaggctgcgcctggcccaaatggaaaacccggacttaatggacaaaccgtccgcagaacctgccagaacgctgctgaacgattgcctggcaaaagccgccgcaggagatttcatcacgctgaaaggaatttccgaatacgtcacgccggaacaatgggaacagctgaccgccaccctccgtaaaaaagctcagggggggaacgcccgcagccaggcggatctggcatacctgatgttattcagttacaggagcgaagaatccggctacccggaagccctggcctgggcccggctttccgccggacagggagattcctgcggcatgtatgtgctcggccgcgccctcatttatgaattcggcctggaaaaacgcatggccgagggggattcctggatgttccggggagccttgaaaggacatgtggacgcggcggacatgtggagttccaacaatgagaacctgcagccttacagcgccatgatgcacggtctggcggcacgggggcatatcccctccctgcttttcctggccaaccaggcggcctatccccagaatacgggggaaacagcggccctggacaatggatcaacttccgcctgccagcatgtcaagctgaccctgaacggaggggacgccaacactccgccgtggctccggaaaccggaacagaagggtaagggggaagatactccggcggatgccggaaccgttcctccctggatgaccccgtccggcagggaacgccaggccccggccccgaaaaccatcaatccggaagccgtgaagttctgggaacaggctgtggaactcggcagcctgacggcactggacgagctggccaattattatgaaaccgtggcagggaatgtgcaggagcctgcggaacggcagcagcttctggcctctgccatgacggcagccaccgccctggtgaaaaaggaggacgtacgcggtttcaagaggctggcccgctattacgggcagggcatcggcgtgcagccgaacagggaactgcacaaggattatgtactgaaagccgcggaaaccagggatccggaggctctggtggagaaggcgcgcctgctcatcaagggcgaggatctggagccggacccgaaattggcgctggatattctgaccgatctggaagagaaccagacgcatgcggtgcccggcatgcatttcctgctcggctacttgcatgaagaaggcctcggcaccccgcaggatatggccctggcctatcagttttacatcaagggggcggaacaggacgacgccaagtgcatgaacaacctgggttccatgtatgaacgcggcaccggcgtagccaaagacctggccgaagcccaaaagtggtatgaacgggcggcggagctggggaatgaagacgcccttgccaatgtggaacgggtaagggaaaaactcaacacgaagaagaaataggctcctttcccgttccggaaatgccacggaatggcggcagaacacaaatttttggcgcaggtttctgcagacggcagaaaataatgtgtgcgaagcggacgcgattttttaaagcggccttgcctgtttcaagggaagtaaatgattttgaaattcgcgcattcttacacaactagccagccggccggtgcggcacggatacgcgaaacttctaatccggggccatgccgctccgggccgggaggcattctcaaaaaaacgtcatcagcaaataagcggctcttttgaaaaataccttaattatcaatgctgttgaccatttcatccgtccctgtccatcaaaccggaaaaactgcgtggaatgaaagtaaaaaaggaggggataattcatcccctcctcacataaaaccggctttgacacagtctgcccggttataatcatttgtatgcccgtcatcagtttctgcggcggcgcagaagaagagcgcccaggccaagaagtcccagagaggccgtagccggttccggcactgctcccccggaaataagaatattgctgatctcacaccccatgccgccggcattggccacacgggtattattgaatattaagccaaaagaagaataattcgcatcggggtccaactgcaggtcgaaagagacatcaacaggctcattctgggtaagagaagctttggcattttgcaaagaccatgttcctatgaccgtggatgttccctcggccgtgaatccatacacattgcaggtataatcgcagttgaaatttgcggctccccaagcagaggtgtaagtaatcgtaaaagacatcttggctgactccactcctgaaggcatgtcaaatttgagaccggcaaaatttcccttgccgacatcggctactccgccgagttgaagaccaagggaaccatcgtttaacgacacctggcccgacaaagcgcttttcgttatagttccatgccagacatcggtttcataaccaaagatatcctggggtgttattccgtcaagggatacggtgttctgagccccgcccccggttggagaaagatccagagaaaacgaggcagcatttgatagagaagacaatgccaaggcggctaaaagacaaagtgtttttctcatgacaaaaaaatccgtaccggatttagaatccggtgtcaacataaaagaatcaaaaatgtagataactgaatctgttaccatgttttttcctccagtcccgaacggaaaaaaaacgaattgtccccttcgcccattatggaaacacagaagggaagaaaaacggcgcttctccccatgaaaataatttttagattaaattattaatgcattacatacataatgagatgaaatgccaatgactgaatcattctttgtaccaaaaatgtttcattctttgcattcgaaatgcggattctaaattcgcctaagaaaggagagtattttatatacaaaaaggcgcaggcattttggatgcctgcgccttttcctctcccacaaggaggaaaaccgcatcaataattcaggatgccttccgcgaccttgcgttcgaagtcagcaacatctaccacctgcccgctcagccgggcgtgttccgtggcaaaggccatcacatgggaatgggcggattcctcaatggaagtggtcatatcttccggagagggcaccgtcagcatgtcatcatacagagcctcaatcaatccccagtcgccgccgccgtgcccctggtagcctccggccagttcctccagctccaccacgcgggtttttccaccaaagtggggcgtcacggttatttcaccggggccgttttccttgtagaagactccggctcggattttgcctttggtgccatacacttcaatgtggcgcccctgttcgaaagccgtcatcgtgaacgtgcccgtcaagcctccctcaaagcgcatgatagaaacctgatggtccggctggtcgttgtcgcactggaggtagtccctgccccacggggaggttttcagccattcgcagatttcctctgcggtagcttcctgcgcccggtcatataccatgcccagccagcgtttgcattcgtcgtccgtggcgtatttgcgggcgtcccaggggtcttcccccaccggggtggtccagtccgtgcagcgttccggccggggtgaggagagcgtctttttcgtaaagaaggtaagctccccgaagctggcgacggaaaggcatttacgccggcccatgagccagtagaggatatccatgtcatggcagcatttggcaacgatcatgggagtggaggttttgctgttgccccagtgtccgcgcacgaaggagtgggcaaagtgccacgcccccacgccttcattggcattgaaggtgatgacttccccgatttccccgctgtcgatgatttttttcagggtccggtaaaactgggtgtagcgcagcacgtggcacacggccacgcggcgcttcagcaggcgcgccgtatccctcagctccagcgcttctttcagcgtcttggcgatgggcttttccagcaggacatgatagcccagctccatggccttcctgcacggagcgtaatggtagtcgtcctgcgtgccgatgatggccacgtccgccaggcgcggttccgccagcagggaagcggcatccttgaacaggcggacggaatcccgttcctcctccggggcaaagtcgcgaacggcttccgtgcgctgtttgacgggatccgccgcggcggcaatgcggtagcggtttttttgttccatggccagcttcatgtaggtgcgcgtacgggaaccgcacccgatgccggcgagggagagtctcttttgttcaggcataaggattgtgcagataatatgggtagagaggttaaagaacgccggatttgacaagcaacgcttccgcgtccggatcacggcccatgaagtcgcggtagagttcagcagcaggcttgctgttgcccttgctgaggatgcagcggcggaagtcgcgcccggtccggggattcagcactccttctttcaggaagcggctgaaagcgtccgcttccagcacctccgcccatttgtaggagtaataaccggaagcataacccgtgggatccgcgaagatgtgggtcaggcggcgcgccacggaagggccgcggtccgtcatcggcacccggtaatccgccagaatgcgttcatccgtttcttccagcggaacacccttgtactgaggccagtttacgtgaagctccagatccagcttgccaaagcagagctggcgcatgaaatccgtgccgctcatataattgcgggcggcgcgcattttggagaacagttcgtccggtattttttcacccgtttcatagtgggcggcgaagaggtccacggattcacgctcccaacaccagttttcattaatctgggagggcagttccacaaagtcccaggcaacgttggtgcccgacagggacttcacttccacatcggaaaggagctggtgcagcaggtggccgaattcatggaagatggtttccacctcccggtgggacagcagcgcgggcttgtcccctacgggcttggtcatgttgccgaccatgagacccagatggggaacgcggggttttccgccgtgcggaggttcccctacgctcaggtagttcatccacgctccggcgcgcttggagtccctcggatgccagtccgcataaaaggaacccaggtgttccccgctttccgcatcatgcaattcatagaacaggacgtccggatgccacacctccaccgcgccttccggcgcttccccggattcaccgggcttgaacgccaccgtgggacgcggcgtgaccgtgatgccgtacaggccggagtagatggaaaagagcccttccatgactttttccacggagtaatacgggcgcaggtcttcctcgtcaaaagcgtacaattcgcggcggcgtttttcagaccagtatccggtttcccacggggagagcttttccacgggttttcctgttttttcctccttgtatctgcggacggcttccatgtccttcaggaaagagggctttaccttgtcatgcaggtcattgataaatttcagggcgttggccccgctcccggccatgcggcgggaggtggcgtaatccgcaaagcagccgtaccccagcaaatgggctttcctgtccctcagttccaggatttcagcgataagggcttcattatcgtattccccccttttccgatggaacaggagccctcccacatgcggcggcgcagactgtccgagtccgcaaactgcatgacaggctggagggaggtgaatttctgggtgaagcgccagcggggctcttcttccgtgccgtggccgttggccagggcgtccaggcgggcggcctccttcacggaatccggcagcccggagagttccgcctcatcttccacaatgagttcccaggcgttggtggagtccagcacgttctccgcgaatttcttggtcttcagggagagctgggcttctatttccgcgtattccggcttcacgtcgtccggcaggtccgccccgctctcacggaaatccgccagcgtttcctggatgaaacgctgcctgacgggggaaaggtctttcacccagtcacaggaggccgcggctttcagcaccgtccacaggcgcgggttcaacggcacggaggaggagaaagccaccacttccggcagcatttcaccaatggcctccctctgggcgggttcgtcattgacggagtccaggtgcataatgcggccccagcccaggtgcaggtcctcggaagccttttccagagcgccgaaggtgctttcataagtcagggaatccagcggctggtcacagatggcccggatattctctttggcgcgggagatggcttccgtgatgtccggcctgatggcctccggcgtaagccgcgaccaggaaaccagaaaggcggggtccagatagggatgattcatattgtttgatgtatgatgttattgaaaatgaaaacggacgcgttccggcatttgccgcaacagccatgaaaaaataaaacttaccatgtttcagagacatccggcggaacggccgcggcctgttgggcatcttgatgaatgcggcggggacggaatccgccccttttttatcaccgcaggcttatttttcaagatgaacaagcttcctgccacgggattgggcgtcatgttccagcgtgatgcggggaaatgccgtttccaatccaaaaccgggcgacagaaccgtttccaccgcttattccggattattttccggaagaacgggccttatccagggtctccagcactccggcatggttcgggaagcgtttcaacgcctgttcgcacaaatccgcgcattcccggaattttccggccttcaggtaggcgcgggccaggatccattccgcggggtatggcaccacgggaggaaggagcagggaggaaaaacgctggctccgtatggcctcggacatccatacattggcggaatccggaaacatgagggagcggatttcagaagaatacaggctgcccatctggaggcagcgcgcccagtaggagacgctcatctgcctccgggcggcgtccgcgccgtccatcagcagccgcagaataccggacatcttgtcaaaggcggacgccacggcatccgttctgccctgccttgcggcgtaacatgcgcccatgtattgggaggccactgcggtcatgccgttgctcaaatccggaaaccctttggggagagggcccggaaaagccttgagcacaagggcctgccggggaaggccgggccgggccagcatcaggcgcgcaggcagcgtcctggcctcccatagctgaaggagggttccgggagccagcggatgctttttatccaggggaacggaagcggctctggaggcgatggcttccgcccttttgtaacggccggcgcagaattcggaaacggcacggtaaaggatggagcggaagtaggcgtcatccagcgctggagacacgttttccgccttttcccaggccaggcacagattttcagactccttgaacgcggcggaagccccttcataatcacccgtgcggaacaggcaatggcccagcaaatgatgggcggatgcggaaaaggggttggcggccacggccctgcgggcggtttccactatttccggagaaatggatggagccacttcctccagcagggcgcgcatgaacagggcggcctgggagccggggcgttccttcaggacggcttccaccacgcggacggcctccttctgcccttctccgggattgccctgcccgtcaaagccgtcccgcaggagcatggcgtaaaagaggggggcgtatgggtcgcgcttccaggtgaaacagatggttttccacgcttcctgcgccttcacggggccatccatcagcaacacggccagggcatccgcataagcgcgttcctgttccgggcagtccggacgcagcgccagctctttcatgcgcttcatggaatggacgcgctggtcctggaaggcgggccccgcgcccatcaggctcatgcacctgccccagtgggccatgaggcagtccgggtccagacggagagcggcgtcaaatttaaggaaagccctcatgtccccgaacgtgagcagatgcgtcattccctccagcaccagcatttgcgcggcgggagatgaggaacccaccatcatcggctccacgccgggcggcagcacggcaggctgcgccggaacgccggcgcggaagacggcttcccgccagccgttcagggacgggctgttcatccaatacccatgtaccccgtccgcggcggcggaagaacaccccgccacggcggcggccagcaggacatggaggaaagaggcgtccatacggaagaaacggttacatcctgtccggaagctggatgcccagcaggcccagcccgtgcttcagcgtgcgtgcggtcagctcgcacagggccaggcgggagtgccgcaccggcccctccgacttcaggaccgggcacgcctcatagaaggaatggaaagccctggccaggtcaaacaggtaggcggccagcacgttcggacggcagtcgtccagcacctgcggcaccacttccccgtagcgggccagaagccgggccagatggatttccgcatcttctgaaagctgaatgggggcggaccagtccaaaggcccgccgtccagcttgcggaagatggagcggacgcgcacgtaggagttctggaggtacggcgccgtatctccctgaagagccagcatcttgtcccagttgaaaacgtaatccgtcatgcggttctgggacagctccgcaaacttcacggcgcctatgcccacaacttccgccacgcgcttcttttcctcatccggcatgtccgggctcttctcctccaccacgcgggccgcgcgttcaatggcttcatccagcacatcctggagggaaaccgtatccccggaacgcgtcttaaacggcttgcggtcgtcacccagaatggagccgaacgcaatgtgccggtagtccccgtccatgccgcggcggcgctgcgtggagaaaatctgcctgaaatgcagggcctgaggggcgcccaccacgtaccagatggaatccgcgccccacgtcctgatgcggtggtccagcgtcgcgaggtccgtggtggcgtacaggaagcctccgtccgctttcctgatgatgcaggggttggcgcgccattcccccttgtcctgcacgaggaaggggtcttcattgggcggcacggaaccgtcggaaaacacgcagatggccccgtcgctctcccgggccattccggcggcgatcatgccgtccaccagcggggccagggcatcattgtaaaagctttcccccagccagtaatcaaaatggatgtcaagctggtcgtaaattttggaaaggccggatttggaaacttccacgcagcgtttccagatggccaggttttccccgtccccggcctggagcttcaccagttccgccttgcaggtatccagcagttccggcttttccttgcacatcaggttcacatccttgtacacccgcagcagctcgtcaatagggttggcggccagggcctgctcatccagaatattcttccagccccacaggatcatgccgaactgggtaccccagtccccgatgtggttgtccgtaatcacatggtgccccacaaaacgggccacgcgggaaagggcgtcaccaataatggtggagcggatgtggcccacatgcatcggcttggcgacgttgggagcggaaaagtcaatgacaatggttttgggggcctgcactttttccacccccagccggtcatccgccagcatggccagcaggcgcgctgcgtaaaattccggcctgatgcggaaattgatgaatccgggcccggcaatttccagggagcacacggcatcctgccctatccggtccgccacctgctgggcgagcacacggggattcgtgcggcaccgcttggcaagcaccatggcggcgttgctctggtaatccccgaaccgcaaatccgcggagggcgtcaccgaggcgcgaaaatcagcgggaagctcctcccccaacaccgcctttaatgcggaggacaacttttcttcaagaattccgggtatggtcatgtctgcccagatgaacggacattccaccgccgtagtcaaggcgcaactgtcatcaagacataccttttccggtaaaaacaacaggacggagataacatccccgtcccagccggcgaaccgaacgcccggcgcccgaatccacccttcccttcaacgggcgcttccttaaaaggagcgcattctggaagccttcagccacgcttccagttttttggaggccctggcctccctttcccgtttcttttccggcacggactttccggagaaagccttcgccagaaccgatgccagttttcttttcattttcattttatttatattacagtttttgttcctccgcatacgggggtttgggaatcatcccgccccccctccggggaacactgcctacatactgtaccaggcaagtttagtccataagaaaaaaacaattccttgtcatacttgatacaataagacgtaaaatgttcattaaaaacatctctccatcaactccgcatcccctgctgcgcgtcaatcaaggagccggccatcctttatccccatttcctgccgccgcgcgccataaagcgggctgccggaaacgatacgctgcccggaagccccaacagccccgcaccccatgattttccgcgcaggcgccggacaggcattaccggaagagggtctcctgcttcattcccccctgaaatcatatttctccgccttccacaggaacatgcgccggtacaggtggtattccgtcacgcaaaggacgggcatgccgatgatgccgatgaacggcagcaggcgaaacaaatgacggcacagaaaaagaaccaccatcaggaagctttcccggtacacggtcatgtacagggaatacgggttgatgagcgttctcctgtacagggaggaagccagcagcggccccaaaatgggaaccacccccagcacgaccacggcagcgaaggtccaccccctgcggcggccaatatacgcatcataccggtccacggactgctcaccctggagcaccgccttgccgcaggcggggcaacgttggtcaagagagggctcacggagaggctgcccgcagtaaaaacaccgccggtagctgcggagaacttcctcatgccttttccatccggagggaggaaccacggtgcgcagcctggaatatcctatccagttcagggcacggggggacggattgggcgtgccgcactccgggcagtgcagcccgcacgggtacatcatggagccgcatttggaacagaaaatacggtgggaatattcccggcggcggcaaaaaatgaagaaagccccaagccccagcccccccagcagggccaggatgacgactacccccgggtacaggagggaataggctaccaggtattccgaccaggaatggtccgactggtgcatgagggattccggaccgatgggattttgcgccacgtccggaagctggcttacgtatttttcacccatgtccctcagaggccccgcgggaagccattgttgtatgggaatgggttctttcatgactggacatgcagggttcgccataaaaacagcatttcccggaaggctgtcagaaaaacggcggcattcagcataggatgtctccgccggaataggtaggggaaaataggccatgccggaaaattccgccggaaatggggaagaggcccttttcatccggcgcttttccgtgtaatatttctgccatgccgactctccgccaagccgccaaggacgacatcacgctgatccatgaactggcctgccaggcttttccggccacataccgggacctcctttccagagagcaaatagatttcatgatggactggatgtattcccccgccaacctggaaaaacagatggaggaggggcatgtgtacttcatcgcctcccatgagggaaaggactgcggctacctgtccgtccagccggaaggccccggcgtcttccatttgcagaaaatctacgttctgcccggcttccagggcctgcatataggaagctttctgttccgccacgccatcagctacatcagaagcatccacccggaaccgtgcctgatgcgcctgaacgtgaaccgcgataacacccgggcggtggaattctaccagcgcatgggcatgcggaccctggaacgcggggatttccacatcggccacggttactacatgacggactacatcatgggactggatatagcctgaaacgcctctccctcagggaaaaaacagccaaatcttcccagggcagggagtgccccgccccccatccccggcgcatgcgggccgttgaacccttaggaaactccagttgaaaattccgcttcctccttgacactcaatgttgaattcttcatcatccgttccatgaacgcctttcctgcctttattttatccggtatcatcgccgccatggcggttcccgcctccgcccaggcggcggaaagcaaagtcacctatccagccttcaacgacggcagccatatccacgggccgaaactcaaagcttccgacctgaaagggaaagtggtgttttttgaatactggggcatcaactgcccgccctgcatcgccagcatgccgcatctgcaggaattgcaggaaaaattccagtccaagggctttactgtcataggcagccacagccagctcccgtcccccagggtcaaacagtttctggaagaaaagaagatcactttccccatctatcagagtctgagcattccggaggctccctgcccgggcggattgcctcatgccgttctgattggagccaacggaaaagtcgtggccaagggctatcctccccagctctatgacctggtgaaaaaggaagtgatgaagatggaacgcggccttcctattctggaaggagtggaactgaacaaatacaaatcgctggccaaaacggtcgtttccaccggcagcaacatcgaatccaaaatcacacctctgaggaaaaaaacgaatgacgaggaagcgcaggccgtatgtgaagcttttgacgcatggttggaaaataccaaggaaatcgtgcaggcccggatccagtccgaccctctggaagcggtaacggccatcatgcgcctcaaaacggcggttccctccgtcaaggaatttgacgaacctctggcggccctgaaagcgaacagggatttatcaaaactggccgacctcaataaaaaaatctccgctctggaacagcgcaaggcaaaagggcgcaaaatatcggaatccgaccttaaatccctgacgcaggccgtggacaaattcacggagtccgacaacgaagccacgcaaaccgccgccgccagcctgaagaagaacctctcctctctggccgctccggaaactcccgggaaataaccttcccctccagcagccatttcctgccggcaggcgtctaagggtgcctgcttcttttttcaccggacgcctttttctttttcccctccagaacagacggaacagccagaatggagcatgtctccctgacaagggaggaaagggtccggtcatcgtccagatccgtcaccaggaaatgcggcctggcgccgggataggggcagccctgctcctgttgcggaaacatcttcaaacccgactccgttatcttgacatacaactggttgtcacacaccaaaccgaagaatgtccggccgcagtacaatccgtagtccccaaacatttttctgaaggaaatatccccggcatgccggagctggaaacaaatatattctactacatccggggaagaggccatgacgaactctctcatgcctcccccgtccgctgcaagaagcaaatgacggccgggaaggcttccggcaggaatgaggcatccccgttattgacgggaaaaggcgcagcatgccccacggagtcatgacgaacggcatccatgccgccgcagccgctccgcaagaaaatccttcccggcgtctgcccggcaagacatgaacggcagcagcgattccatccgcacagagccattcttatgattgccctgacggagctttttattcatgatgcccatgaaccttccatgaccgccgcgtccgacatcctctggaaaccagcctgcctctcccgccaggaagcccccacccttacggaaggggccggaacctgccggccgggaaacggtgaccggaacacctccgcgaaccgtccggaaaaccatgaaaccatgggagaaaaagaccctgcggagaaccggaaagcgccccggccgcgaagcgggcgcgtcatcctgctcaacggagcctccagcgcgggaaaaagcacactggcccggaacttgcagcttctgctgaaagaggcagctatgattttctccatggacgattatctggccatgagccggggaaaacatgaaaccgccctggatgccgtcagggaatccggcctgcccttcattgaatctttccacgccgccattgccgaggcggcccggaaaggcgccctggtcatcgtggaccacgtcatcggagaatcccgccgctggattcaggacctcctgaaccgcctggacggcatcccccgcatcctggtcagggtggaatgccgccaggatgttctgctggagcgcgagcggcgccgcactgaccggactcctgccccggcccatgcccagcgccagcacgcaggcatccaccgccatttcccgcatgatttctccatagacacttccgcagacactccccggaaatgcgccatgcggctcatcagcctcctgccgggagaattcctgccctgatgccgtgggaacaggcggaagcctcccgtttgaaaaaacaggctgttcccgcaaacatgttggaaagacatgaataggactttacagagccgtctccttcacggtagcctgtgcccgcgcttgttgcacggagagatggcagagcggtttaatgcagcggtcttgaaaaccgccgtggggcaacccaccgtgggttcgaatcccactctctccgccaaacttcttttatgccgggcgcaagccatgcctgttttcacggaacagaaaaaggcaggcgaatacgacggccgccccggcattcccggaacggccctgagtgccttattgatccttcctcctgcctaagactccccattcagttcccggcggatgtattccgcagtgggggattctttcccggctatctgctccggcgtgccttccgccacgatggttcctccggcatcgccgggtccggggcccatgtcgatgacgtagtccgcctccgccatgatttccgtgttatgttcaatgacgacgacggtgttcccctggtccgccagacggtgcagcacgtcaatgagcagccgcacatcccgcggatgcaggccgatggagggttcttcaatcaggtacaggtctccgggcagttccctgcctttcatcagggcgttccggctgacgcgccggcccttgatgagttccgtcaccagcttgagccgctgggcttccccgccggaaagcgtgttggaggcctgccccagcgtcagataacccaggccggtttccgacagcagtttgagggggtccgaaatgcggggctggctttcaaaaaattccgccgcttccgcaaagtccatctggagcacgtccgcaatggtcttccccttgtacctcacggtcagggtggcggcgttgtagcgcttaccccggcaggtctcgcacggcacatagcaggggggcaggaagtccatttccagcttttgcatgcccgtgcccttgcaggattcacagttgccctgccccgtattgaaggagaaacggccgcggtcaaagcccagcctgcgggcatccgccgtctgcgcgaacagggtccggatgtcgtccaggaaacccacgtaggtggccggggtggaacggggcgttttgccgatggggttctggtccacgccgtacaccatgcggatggagtcaaagccggaagaggttttccataattttctctgctccctcgtgagcttgtcgccgatggcctggcgcgcagccagacggatggttcccgtcatcagggaagttttccccgctccggatacgccggtgagcaccgtcagcctccccttgggaatggcaacgttcacccccttcaggttgtgcaggcagcagccctccacgcgcagccacgcggattcatccttttgggacggaatcctgcgccttttcccgcggtagggatgcctgggcttatggtgcagggccgcgcccgtgacggagtccggcatggcggccagtttctcaaaggtgccctgggccatgattctgccgccatgaatgccggctcccggccccatgtccacaatatggtccgcgcgcctcatggtatcttcatcatgttccaccaccagcagggtgttgccccggcgtttgagttcatccaacgtgcccagcagcaattcgttgtcccgcggatgcaggccgatggtcggttcatccagcacgtacagcacaccgcggaggtgggaacccagctgggaagccagacggatgcgctgggtctccccgccggagagcgtcgtggcgctccggtccagggaaaggtagcccagccccacccgctggaggaagttgaggcgctgcgtgatttccgccactacgtcacgggcaacgagcgcttcctcccgttcaaattgccaccctttgaccagttctgcggcggccacggcaggcagggaggcaatgtcaccgggagtcacgccctgaagccgcacggcgcgagcaaattcattcaaccgcacgccccggcaggcagggcaggttgttattcccttgtcatcgtccgcctgccgcgccagttccctgtcatatttcagttcagcctccagcagggattgcgcctggtcttcctttactttccccctgccgacgattccatgcccgcggcatacggggcaccacccgcgcggagagttgaaggaaaacgtgtacggttccagttccgggaaagattgcccgcaggaggcgcatgccagcctggtgcccatcagttccggacggacggaaccgggcgggagcacctgcaggaacccttcccccatctccagcgcggcatgaaccgccccggcaagcttttccggcggccaggaggcctccggccgtgcaacgaccaggtccaggtcatggctggaatagcggtccagcggctggaatccgctcaggggaaccagtttgccgtccacccacatttcctcatatccctttccttccgcccagcgggccaggtcggcgtaatgccccttgcgccccctgacgaggggggccagcaacgcgagcccgccatgttttttcagctccctcgccaccagctccaccacttcggattccgacctcttgcccaccggaacgccgcactgcgggcaataggcctgccccagtttggcatacagcagacgcatgaattgccagatttccgtaacggttcccacggtggatttggtgcctccgcgggacatgttctgttcaatagccaccgtggggggcaatccggtcaggcggtcaatgtccggactttccagctgttccgtgaattgccgggcgtacggggacatgacgtccatgaaacgccgctgcccttccgcgaaaaagatatcaaaggccagggagctctttccggagccggaaagcccggtcagcacggtcatttctccccgcggcacgtccagatccacgtttttcaggttgtggtggcgcgctccccgcagggccatcacgccttccggtatatccatgtccgcggagtacggaacggcggcgtccgcagggtcgtaaacggaagggttgccttccagcacatccctgaggtatttgcccgtgtatccctttccggcggctacaatttcctccggcgtgcccgtggccaccacatggccgcctccggcgccgccctccggccccaggtcaatcacgtagtccgcggatttgatgaactccgggttgtgttcgatgaccagcagggtatgcccctgctccaccagttcccggaacacggccagcaaaacttcaatgtccgcaaagtgaagccccgttcccggttcgtccagaatcagcatcttggggctgttcgcgccggaaccgatctggtccagcaggattttagccagcttcaggcgctggttttccccgccggaaagggtattcagaggctgccccagggtcaggtgccccagccctacgcgctgaagcacgcccagcttggaagcgatgcgggaggctttggcccctttttccgcgctgaagcattccagcgcagccgctaccgtcatgccgagcacgtccgcaatattcctgccgtcacggtacacgctcagcacttcactcccgtaccgggagccgcggcacagcggacactgcacgaaaatgtcggaaagaaactgcatttccaccttctcactccccatgcccatgcagcgcggacaccggccgtccccgctgttgaaggagaagaaaccgggcttcatgccgcgcgcgcgggccgtctccgtttccgcgaagagggagcgtatttcttcaaaaactccggcataaacggcaggggtggagcgcggggtgcggacgatggggctctggtccaccatcaccacctcatccagatgttcccagcccttgatggacttgacgcgggcaggttcttcctcacatacggctcctttctccaccagcgcgttcaggtaaaggacatcgtgggccagggtgcttttcccggacccgctgacgcctgtcaggcaagtaaagacgcccaggggcactttcacgtccagtttgcgcaggttatggcgcgtagcgccggatacggtcaaaaaccggcgcggcttgcgcctctttttgggcaccgcgatgcgtcgcctgccggaaagaaaagcccccgtcagggattccgcaatttctccaatccgggcaggcaccccggaataaaccagccttcccccttcccgtccggaaccgggccccatatccaccaggcagtccgcggcgcgcatgaccgcttcctcatgctccaccaccaccagggtgttcccgcgctttttaagccggttcatggcggaaatcaaacgggacgtatcgcggggatgaagtccaacggtaggttcatccagcacaaacagcgtatccgtcagggaagcgcccaggcaggttgtcaggctcacgcgttcaatttcccctccggacagggaccgcgtggagcggtcggacgtcaggtagcccaatcccacttcattcagatattccaggcggctcctgagttccgccacggcatgtttcaagccggggtcttcatccgtccgcggcgtcacgtacctatccacccaggccaacagttcatccatgggcatgccggaaagttccggcatacttttgccgcccaccttgaattgaagggcttccggcctcaggcgcaaaccgtggcaggaggggcattcctgatatgtgcggaaacggctcagatacacccgcacgtgcatcttatgtgtgcggctttccagatatttgaaaaagcccgcaatgccgtaccacagcccctgttcatacatttcatccgggtcatcgccatcaccgtacagcagccagtcccgctcccattgcttcaaatctttccacggcacatccagacggactttgcgggcgtttttgcgccagccgcgcatcaggtcccgcttgcattcggaaaagactttcccgtccccctcaaaaatatggatggccccgtcatgaacgctgagttccggcttgatgcaccggttgtagtcaatcgtgatgacgcgcccgtagccgcggcattccggacacgcccccagcggggaattgaaagaaaacaggcctggccgcggctccatcagcggatgccagtccccgcgggatttcaaagcggacagccagacgccgtccacacggggaatcacatgggccacaccgccgcccaggcgcatggccgtttccagcgcttccagcctgcgttccctctggtcttccgtcagcctcacgcggtcctgaaccaccagcagcggttctccttcctccagcgtccaatcctcatcctccagccggagggtctctccatgcgcaaaagcgcgcaagtacccctgtgccaccagattccttttcaacgcgggaagatccacggattcgggccgcgccacctccaggcaaaccatcacttccgttccggcggggaagtccgcatacagtttttcatcaatggtgcccggcgtttccggcttgatttcccgtcctgtttccgggtcaatgcccacggccagacgggcgaaaacaaacttccagtaatcattcagcccagtcatggtccctaccgtggagcgggatgtcctgacggagttgcgctgatgcagggcaatggccggaagaatattctctacggcgtccacgtccggcttgtccatgcggtccatgaactggcgcacgtacggggaaaaggtttccatataacgccgctgaccttccgcgtacagcgtgtgcatggccagacttgttttccccgagccggaaggtcccgtcaccaccgtcagccgccccaggggaatgtccacatccacattctgcaaattatgctcacgggcgccgcggatgcggatgcgcccatcctcacaatgactcatggagaaagaatatcatcaatttggaatcattccaagagaagcgcctgtcatgaatccgggtttccagaggagtccggccaggtccaacctgcctattacgtcatcatcagcacaaatggagggccgtgcttgcatttcttccggcagccgctagtatttttcgattcttagaccgctgaaagcgactctacctcgtcaattttcaacaagacaaagatgattaagtggattctaaccaagattgtcggcaccaaaaaccagcgtgaagtgcgccgtctgcgccccattgtggaacaaatcgtctccattgaagaatcatggaacggcaagggacaggaattcctgcttgagaaaacgagggaatggcaagggtacctccatcgcttcctccccatggatctgccccccgtgcgcattgtggaagccgcgcccagggaagagctggaggaaatagccgccaaactgaacgcccgttttgaatccctgaaaagcgaattcgcttccctccccgcggtggaagccactcccgcctccattgaagaagggaaagccgcctggaacaacattacgccccagtttgacaagctgcgggaacgctacctgaaccagatactgccggaggccttcgccgccgtcaaacacggcgcccgcctgctctgcggggaagaacgcgatatctgcggtcaaaaacaggtttgggacatggtccactttgacgtgcaactgctgggcggcattgccctgcaccgcggctacattgcggaaatggccacgggggaagggaaaacgcttgtcgccaccctccccgtttacctgaatgccctgaccggcatgggtgtgcatgtggtgaccgtgaacgattacctggcgcgccgcgactccgaatggatgggcatgctcttccagttcctggggctgactgtcggctgcatccagagcatgatgccctcccagctccgccgggagcaatacgcctgcgacatcacttacggcaccaacgccgaattcggcttcgactacctgcgcgacaacggcatggcaacctccaagtccgaacaggtgcagcgcgggcactacttctccattgtggacgaagtggactccatccttattgacgaggcccgcacccccctcatcatttccggccccgcggttgttacccgggaacagcagtacgataccctgcgccccgccattgaacgcgtggtgaaggcccagacggacctttgcaacgaactgatggcccaggccatgaaagcccaggaggaaggccgcacggaagaagtgggccgctgcctgttcaaagtaaaaatgggccagccccgccaccgcgccttcctgcgcgccatgcaggatcccgagctgcgccgcatcgtggaaaaatatgaactgaccctttaccaggatacccgcaagaaggaactctacaagctgaaggaggaaatgttcttcaccgtggatgaaaaaacccacgacgccgacctgatggaaaaaggccgggaagtcatctcccccggccatccggaagatttcgtgctgccggatctgggaaccgccttcgcggaaatggacgaagatcctcgcctgacggaaaaagacaaactgcgccgcaaaaatgaactgaccaaacagcttgacgaaacgggagcgcgcctgcacaccacctcccagctgctgaaggcctactgcatttacgaaaaagacgtggaatacgtcgtcaaggaaggcaaggtcatcatcatcgaccagaatacgggccgcgaaatgccggggcgccgctggagcgacggtctgcaccaggcggtggaagccaaggaaggcgtggaagtggagcgagaaaaccagacgtacgcgaccattaccatccagaactacttccgtctgtacaaaaaactggcgggcatgaccggcacggcggaaacggaagccgcggaattccatgatatttacaagctggacgttcttcccatcccgaccaaccgcccctgcatccgcaaggatcagaatgacctcatcttcaaatcccgccgtgaaaaattcaatgcggtggtcaacaaaatccaggaacttcatgacaaaggccagcccatcctgatcggcacggccagcgtggacgcctccgaaacgctctcccgcatgctcaagagggccaaaatcccccatgaagtgctgaacgccaaaaaccaccagcgagaagcggaaatcgtggcgcaggccggcaagcgcggagccgtcaccgtctccaccaacatggcgggacgcggcacggacatcaagctgggcgaaggcgtagccgacctcggcggcctctttgtcctgggcacggaacgccatgaatcccgccgcattgaccgccagctgcgcggccgctgctcccgccagggggaccccggcgcctcacaattcttcatctcctttgaagacgacctgatgcgcaacttcggcgcggcggaacgcatgaccaagatgatggaacgcctgggcgtagccgacggtgaagcgctggaacacagtttcctgaacaaatccgtggaatccgcccagaaacgggtggaacagcgcaactacatgtggcgcaagcacgtgctggactatgatgacgtaatgaacaagcagcgcgaaatcgtttacggataccggaatgaagtgctttccacggaaaacccgcgcgaaatgatttacgatattctggaagaagtaatcgccacgcgcgcccatgaattcctggacccggatgcggaaggcgtcacccacccggacgaattgctcgcctggatgaacgcatccttcccgctgggactcacggcggaggccgccaagctggaagaacggcccatagacgacaccattgccttcctcattgacaaggtcaaggccacttatgaagacaaggcttcccgcgaacgcccggaatacctagaccacatggaacgccagatcatcctgggggccattgacaaaatgtggcaggaacacctgtacaacatggactccctacgggaaggcgtgcgcctccgcgcccaggggcagaaagaccccctggtggaatacaaatcggaagcttacgatctcttcatcaccctgatggaaagcatcaagagcgaagccatcagcaacctcttcaagagcaccaccaacctggacgcctttgaggacttcctggccagcctaccccagtttgaatcttccgacgaaaatcaggaaggcggaaccagcctgccggaaatcggctttgacggcatgccttcggacctgctctccgccctgagggaacaagtctcccgggcacgtgaacaacaatccgcccggcaggcggaaccggaacaggccccggccgtcatttccgacgccaccaccattggggaaggttacaaaccagccgtggcggaacccaaactggtcatgcccaagcgcaaggtcagcgtcgtgctccgcaaggaagaagcctcccaggcgccggcggaaacgccggcccccggagacggagaagaaattgccgtcactctggactcccaggactttgcggaaaccatggacaaccgggattccgcggatacccgtacattctaaaaacgcagcgcatcacttacaggccgtgggaaaatggaatatccttttcccacggccccaagcttccggtcagccttggctacgctccctcccaacaaatccgccaatgtccgttccgtgctggagtatgttccgtacttcagggataaaatctttgccgtgcatgtggaacgtcctctggtggattccgaggaattggtggacgccctgctggacctggatgtactgcaggaaataggcgtcaggcccgttctgattgtggaaggggcggacgcttccgcgctgtacgaacacacgcgcgtctgtgaaatgcgctccgccctggtggaagcgccgttaaaaggcggccagcttgtccgggaaagagtccgggaaatcctggggcgtcaccaaattcccgtggtggcttccggccgttccggctcctttgacccggaatccgtccatatggctttcagcctgggggcctccaaatacatcgccctgctcaatgaccacaaggttccgtccctggacggacgccccattgccgccattctggaatcggaagtagcggagctggcaggaaacgtaacccaccgcgaactgcttgaccaagcggcggaagcctgccgggcgggaatcccccgcgtacacctgctggatgggaaaatgcgcggcgtgctggtggaggaactcttctctgaagaaggcgtaggaaccatggttcacacggactcctaccgggaaatacgcccgctgaaagaagaagatattccggagcttctctccatgatcgcccgttccgtggtagactccaaattagtcaaccggaattacgaagacattgccgccagaatggacagttactacgtgctgaccctggacgacagcatcgtgggctgcgttgccgtttatccctacccggagcaccacagcgcggaactgggctgcctgtacatcaagcaccgccatgaaggacgcggctatggccgcgcactatgtgaatttgccaaaagaaaagcggaggaaatgggaatggaattcatcttcgccctctcccaaagtgccgtccattacttccgggaccgcatgcattacgcggaattttcccgcgacagcctgcctccggaacgtctgcgcaccctggaactcagcggccgcaaatccggggttttcgggttaaggctgaaatagttttctattgaccaatcttgccccgttcctgcttatgggcggaattccctgcaccaaatggacgggtagctattcccgtctctcgttaaagggtatatagtaaattcgggaaaggtcttccatttttcttttcctcctgaaattttctgcccgccgaaaaaaatatcatcaacaataatttgataataaaaatcttataaaataaccacataacttaaaaagaattatgcggatttttaatccgtccccggctacggcttctccgagcctttcgggtttagctgctctgatgatgcgccgcagcatctaaaacccatttccccccctccgccggattttcaaaaacaatgcggttttttattttccagtacctgtccggtatcggatccttcacttcatgcggcatcctgaacggcaaaatcctgagaaaagaaaacgcagcttctcacaagcgggattccaatccaacattcatatccccatgtggatatgtgcaccggaataacagtactccacggttttccagggcggaaagtgccggggggaggcttccaattgtcaatcaagctgtgcatcattgtgcatgcttttttgaccatatgataccctttttcactgttttccagcagagtgcaataaaatatgcactaaaagtaacaagccccttaaaccgttggatttaaggggctttgaagatggtagcagggaggtgatttgaacacccgaccaaaggcttatgagtcctctgctctaccactgagctaccctgccgttaagtggttgatgccgtaaggcggggagatatttagcccggattggaaagaatgtccagatttttttatggttcaggagcattttatcatgacaatccgcctttccctccggggaaatcattactgatgaatcatttttccactcaaccgtctcatatggcccgcgtcccggaccatttcctgcataccgacatttacaacgcagggtatgattattcctccagccccatgccattgacagagcgggacaggaaatagagacccataaagattttcggatccaccacttttccctgctccatctgctccatcagccagtcatgcaccagagtaagaggaatgcggtgcacagtaatattttcgtgggccacaccgcctccttccgatattcgatgcaggccttccgccatatagaaagataccatttccgtagtcaatcccggagaggaaggccccgcaagaagatacgtccaggaatccgcccggtacccggtttcctcttccagttcacgccgggcggactgcagcgagctttcctccccttcatccccggaaatacccgcaggcagccctacggtccgggcatgcaggggaacacggtattcttccaccagaagcagttctccttcttccgtcacggccacgatcataacagctccgctggcattcacccggcgcacgtattcccaccttccctctttcaggagttccagaaatttcccccggcagagagacaggcatgcttcctctggctgttccatttgttccatgatgcagcccacgttaggtttccgtccgtctgttgtcaaccatgcggaacgcctcccttctgcatcttcccgtgcagttccaatccggttcctgtaagtggttgatttccggcggcgtaatcatgtccttttcgtcacccaagcctgtaacaaaaccataatatattgacaataaataatttataaaattacacagaaaatatactcaggaggactaaattatcggaggaagcaagaacaaaatattttttcatgtggaacccccgtggaacgtagggccgaggaacgatgactcgcgctgtttcaaaaagatatttttttctcagtcgcaaatcagtaatttggcgctcccgtcaaccggggtgttgagctgaaagcggatgagttcgccttctccaccccgatggacgccacgagctgtcacggctgcggatgaacctgatccggttccatccgcgggcggcctcgtagcgggacggaacgccttacggctatttctaaccagcaacatcttttatttccaataacaatgacgccgccatcagaactgtcagccacctggtccagaatcacgggagccttgcaaacaatcatgtccccggaggtttatggattgtggtttcccaagttttccctgctggaggattcagggaaggcgctgacgctggtgtgcgacgatcctatggccgccctctgggtggaaaacagctatacgccggagctgaagcaggccgccatgctggctctgggcacggaacgccagataaagttcatctgcacggatgaagtggcttccatgcccgctgcagaaggccagccgcaaaaggcttcctcccgggccaaaacgccgcagacggcggattccccggccgcaccggcaaaaaaacagcgcacaccggccgccagggcatgcctgaatgacttatatacgttcgattcgtttgtggtttatgaagacagccgctttgcttatcaggcagggctgtccgccgcacagtcggaacgggccctgttcaatccgcttttcctgtacggaaaatccggcgttggcaaaacccatctgctccaggccatcggccatgaggtgcttcatcaggattcatccaccaatgtggtgtacgtcacgggcgaacagttcgccaatgaatttattgacgcttcccggacccagaacggacaaagcttcaccaaactgcgccgcaagtaccgcaaggctgacgtcctgctggtggacgacgtgcagtttatttccggcaaggaaaaaacggtggaggaatttctgcatacgtttgacgaactgttccatgcccacaaaaccatcgtgatttgcgcagacgccgccgcatgcgatatttccaatctggatccccggctggcggcacgcctggaatccggacttacggtagaattgaaccttccggacgacaacgcacggctggaaatcctgcgcagcaagcgcgaccgggctggcatgaacgtatccgacgaaattctggagtttctggccagccgcatccagaagagcgtgcgccgtctggaaggcgcactgctccgtgtagccacctttacttccctgtccggagacatgcctgacatcgccaaaattgagcagcttctacgcgacatcctgcgggaagaaacaagccgcatcctgaccgtggattccatccagaagcgcgtggcggatttttacgaactcaaggtcagcgatctgaccggcaagcgccgccccaacagcatcgcctttccgcgccagatcgccatgtacttgagccgccgcctgacggaacgctccctgaaagatatcggccaggcattcggcggccgggaccacggcaccgtcatccatgcgaataagctggtcgcctcccgtatggaagaagatgtacgcgtgagggacatcgtccagaggctggaagaagagttgagggattgatttccttatcttcattccctcccggccagacaggaaaagcatcggtcccgttagcccccatggcttttcaggcggaagaagcgcttccgcggcgcaggggagaataagcttgaggcgaaagcggtttggattagaatcaccctgttcccattgattccatgatccacgccgaccagctttccaaagagtttggccgctttcaagcggtaaagaatgcctccttccagattgaaaagggggaaatcgtagggttcctggggccgaacggcgcaggcaagaccacgactttgcgcatgctgaccggctatctgccccccacttccggcacagccacgattgcggggttcgacattgtgaaaaatcccctggaggctcgcaaacatctgggttatctgccggaacacgtgcctctttacgacgatcagcgcgtcacggaatacctgaaattccgcgccaggcttaaaggcatttcttccaagcagatctggcctgccgtctccaaggttgtagaacaatgcggcctggatcccgtgcgccgcaagatgattcgcaccctttccaaaggctaccgccagcgcgtaggcctggcggacgccctgctgggggaaccggacctgctgatccttgacgaacctaccaacggtcttgaccccaaccagatacgccagatacgcgagctgatcaaaggtctggcggccaaccacaccattattctttccacccacattctcagtgaggtggaaatgatttgcaacaaggtcatcatcattgaccagggaactatcaaggcagcggataccccatccaacctgacggccaatctccgggcagccggcaagattactctggaattccggggagacctggccctgattacgcagaaactggaaaacctggaacatgtgaagaaggtcatccatgaaggaacggacgccgacggctggcatacgctgaccgtacgcgcggaggccgggacggatacccgtgaaaaggccgcgcgcctccttgcggaacagggctgccccctgcgccatatttaccgccacacccccacgctggaagaagtgttcgtggaaatgacccgtaaagattaacccccattttccctccccgcccatccaccacctcccatttcccttttctccccatgtctccagtacttaccattttcagaaaagaactcagaagctacgtaatgactccgtacggatgggttatcctggctttcgtcatggcccttcagagcgtctccctgtccggcacgctgaaggcttttcaactggccccgcagaaggaaggcatcctgttcttcatcctgcattcccccatgttctggttttacttcctgttcatcttcccgctgctcaccatgcgctccctggcggaggaggaaaagacgggaacgctggaatccctgcttaccacgcccatcaagacatggcaggtggtcctgggaaaatacttctccgcgtacgccttttacatcatcctgtggctgcccatgcttctctaccccaccctggcggactggtccaacctgattgtgcagtggatttacggatatgacgcgggcatggttcttccctaccgccttgcggactgggccggggcatacgccatactgctgctgatcggcgcctggttcacggccattggcattttcgcctcttccatgacgggcagccagattatttccggcatcatcaccatcggcctgctggttctgattttcttcatggggctgattcccgtggtgtggggggaattccccgcggcggggattttccactacatgtcctgctcggaacatctggaccgcttttccgccgggctggttgacacgcgtcccgtcgtattttacctgaccatgacggtcctgacgctggccgtcaccatccgcatcattgaccaccgccgctggaaacactgattcatcccgccttcacctcttttcatttttatctatctatgagcgaaacaccagacacccccgccgcggccgcggaagcctcccagcccgccgcccgcaaggtcaaacgcccctggatgacctggatcaagcttttcctgctgttccttatcgtcgtatgcctgaattacgtgggctgccacgagtattaccgccgggacctgacggaagaccagcgttatgaaatatcccgccagagcaccaacatgctccagtctccagaaatccagaagcgcaaaacacccgtcaaaatcacgttcgctttcctgcgcaccacgcaaaactatacccgcatgcgttctctgcttgaggagtacgaacgttattccaacggcaaagtgaaggtggagtacgtggatcccctccgccagccgaacaaggcacgtgaaatctccaatatctacggaattgaattcaagaagaacctggtcatcattgatgcccgggaagatacggaaaaagcgctcaagacgtttgaaggcacccaggcggacgccgcccacgtgcgcatcctgcctggagacgccttcgtagtgtacgcccccgggccggacggcaaaagcatgaaggcggtggccctccagattgaagatatgatgactgccggcatttacggagcggccaacggcgaaccgcgtaaaatctatatcgcggcggacaagagcaacttcaacgaggccctgagcaacaaccaggaggaaagcatcttcacgacgctgggcaaaatctgccgttccgtcaacctgcagcttgtgcccatccgcatgagcggtctggaagagattccggaagatgccgcgggatttatgatcatcggttccaaatatgatctgtccccgcaggaggcggaagtgctccagcggtactgggcgcgcccgaacgccgccatcctgatcatgctggaaccccggaatgacacccccagacagctctaccgctttctccgcgaacaggggctgcggccccagaatgaccgcgtgatgctccgcaacaggggcaaccgttccgtttttgaaattaactccattttcgccccctccctgaattgcacccgtgaattctggaattccagcaccgggctggaaggggagagcatctcccttatcctggattccgacaacgcggccatggaacagaagcgcattacgccgtatccccttctggtaaccacggaggattattatggagaaaccaaatacaaccagttcccagccaagttcgacgcgagggaagacaatccggggcctctgatgatcggcgcggcccttatccgggggaatgccggggacgtgaaccagaacaagactaccgggcgcctggttctgcttggcaatacggacctgcttcagccccggcaaatcaaaccggaacaaagggatttcatgcgtacgctgatcggctggatgacggaccgtgaagaattgcgcggcctcggctcccgccatgacctgaccgtcaagctgaatctggaccgcaatgccctgggcgttttggaactcctgacgaatatcggcctccccctgctggcgctgctgatcgccctgattatctggaacactcgccgtcattaaccccatccacgcccattaccggaagcacatgcgcacattccgctttatccttctcatcctcatcgccctcgcttctgtcggcgcggcggtgctcctcaccattgacggcaacctgtcccgcatcatcgggcgcaccgccttcagttccggagaacggcttttcccatacacccgggaagaaatgaacgaggtttcctggatgcgcatcaattgcgtgggggatgtcgcggaattccgccgtaagcccaacggcgtctggtggtgcgaaaaaccctggaacgaccgtatggaccctcgcgcggcggcggccattctccagtacacgtattccaccagcattgtggacgcgctgcctctgcacaaaattgattccgcttccctgaaggaattcggcgtaaagaccacccccgttaccatcactctcaaggaaatgagcgacgacggaaagcgttcctccaccgtagcgcgctatacgctgggttccccggcgccctggctggtggacgatccggagaacaagaccacggatgacaccacctatatgcagacggatttctacggacgggacacccgcattctggtgggcaccggcaacatccttcctctgttcaaatccggtatccgccagcttcgggaccatcgtcccctgctcctgcatccggccatgcccgcctccattgaaatcaacaaccggggccagcgcatcgccctgaaacgcgagactcccggctctccctggaaaatcacgtatcccctttctctggatacggacccggccatgatggatgtgctgctgggcacgcttcagaaactgaccgccgtgcgcgtgtacaacccggaggaaacaagcgtaccggacatgacggatgatcagatcacctccgtttccatcaggaatttcacaggccgtctttcagaagacggcaaatccctgcaaatggaggaacagcccgtcacgctccggatttaccccccctccgacaacggaagcctgtccgaactggtcaaggccaccgtttccgaccgcaaggccgtctttgaactggctcaaacgacggaaaccaacaaggaaattcccggcgtacgcaatattccgctggatctgggccttttgcgttccaagcaattgacggacatcggggattacaaaattaccggcctttccatccgcaagagctttcaggattaccccaccatcgcccgcttcattcagggggatgagaaaaaaggcatcaagcccacctggctgtacacggcagagggcgcccgttaccaggaagcgaatccggaacatctcatttccctgctgaaaacagttaaacaggggaaagtggccggcttcgcctcggacaaggctacggatctttccgtatacgggctggataatcccagaatgacgctcaccatgtcccttctgcccaagcccggtgaagagtcccgcccccccgtgacggtatttttctccaagggggcggacggttcctggtatgccctccaggccggaaaacccaccgttgccatactggacaacgcctacatgaaggatttgctgacggatgcactggcctggaaaaaaaagaggctcttctccttcagcaggtttgacctcagagaaatgcacctggaacgcatcggttccggaggccccctggtcctgaaattcgaccgtctggacgattcctggacggcctccaaagacgggaaggatgaaaccttgaatatcaacccgaaccgcgccaaccgctatctggatgaactggaaaaaatggaggtgagcgcctggctcccctatacggacgccacagcgcatgaagccctgaaaaatcccgttttccgcctgaaactcatcctccagtcttacaaggaggcggcccccgtgcaggcccaatccggttccagcgacattacctttgccccggaaccggaaacggaggacaaagtcatcacgctggaaatcgccccggcgggagaggccggatacagcagattttattacggcagagtaaatacaaccccgaattattttattctgaacatggacgccgtacgtctgctcggcgccagcctttcggaagacaactaaccactcctcccgcatgagcaagattgagctgcacaccgccatctcctttctggacggaatcctctccgtgaatcccattccggacgccccccgcgccctgaacggccttcaactggaaaacgggggcaccgtttccaaggtggccgccgccgtggacggctcagaaaaggccattcatgcggccttggaaacaggtgcggacctgctccttcttcaccacggcattttctggcagcccatgcagcccattaccggcatcgcctaccggaagctgaaagccgccatggacgggaacctggcgatttacgccgcccaccttcctctggacgtccaccccgcatacggcaacaatgccctgctggcgaaggcctgcggcctccagccatgttcccatgatgggctggactaccacggcgtttccctcggtacgcacggagaatttccaggtacatgcgcggaattggagcaaaaactggaaatcgtcctcggtgcgcccgtgcaggccttctggaaagattccccggaggctccggccggagatgtcttcatctgtaccggaggcgcgggagacgatcttgcccaggcagcggccctcggctgccgcacctacgtgaccggggaaggctcccactggaacatccccctggcccaggaactgggcgtcaatctggtcttcggcggccactactttacggagacgttcggcgtaaaggccctggggcttcttctcaaggatgtttacgggctggattatacctttattgacctgcctccctccgcctacagccattgaccaaacgccacggaacatgaatctgactacggacgacgccgacgggaaaatccgcctggatcaataccttgccgcccaccttccggagctttcccgctccaggatccagagcctgatcaaaagcggggatgtgttggtcaacggctctcccgccaagcctaaaaaccccgtctcccgcggtgattccatcaccgtccgcattccggaaccggaaccggcggaagcccagcctcaggatatccccctggacatcctgtatgaagatgaagacgtggtagtcatcaacaaggaaagcggcatggtcgtgcatcccgcggccggcaacccggacggcaccatcgtaaacgccctgctccaccactgcggggacctctccggcatcggcggagtggaacgcccgggcatcgtccaccgcctggacaaggacacctccggctgcctagtcatcgcaaaaaatgacggcgcccaccagtccctgacggcgcagttcgcggcccgaagcacggaaaagcgttatctggccgtcgtccagggtattccttcccaaagttccggcacggtcttcacccatatcggccgccatcccgtcaatcgcctgaaaatggcagtagtcaatcccggttccgggaaagccgccattacggactacgatttgctctgcgcagacccgtccacggactcctccctggttctgtgcacgctgcacacgggcagaacccaccagatacgcgtgcacatgctccatctgggccatccgctcatcggggatcccatttacgccaaacccgcccggcaaaaggcaaaacccggcagactcatgctccacgcgtggcggctgggcttcgaccacccgcgcacgggaaagcgcatggatttcgaagcgcccgtcccgccggaatacacgccgtggctccagctcttccccaacgggctttacggggccatcccggagccgcgcccggtacaggaagacgggggacggaactaaacctccccgccatttcccggcagcggaagccgcttcaacggacagaatacgggaaagcgccatattcaaatcccagagctggcccggccttcgtcagcaatccgccgtcatccggcgacaccatccttgcggacaaagatgcggcaacagacccgccgttcaccttcttacgccccctttccggcaggagcgtccacggtcacagtcagccgggaacaatattcttttcatcaatcaaggagaaatgaacctgcccggcatcttccgggcatgcaagaagaatccgcggcggagacctcccctttaatcttgatttgcccccccggaaccgctaccctgacacggctttaaccacacagctttcacagagacatggagaccacgcaccacggggaggacgcctctccggacaatccccccaggcagcaaaaaagcggaaatacggatgaacagaccatcgccctgacaaaagcgcgtctggccattgacgaggtggacgcccgaattgtagagctgttaaaaaaacgcgccgaatgggtgcatgaagtcggccgcattaaaaaggaaaaaaattcccccatcttcgttcccgaacgggaaacggccctgctcaacaaattgaaccgcctgaatgcgggcgtgctgccggaagcctccctccaggctatttaccgtgaaatcatttcctgctccttctttctggaaggcggcctgaccattgcctacctgggccccaaaggaacctggagccaccaggcggccctcaagcagttcggaaaaagctgcgaactcattccgtgccagagcttcaaggacgtgtttgacatggtggaccgggggaaggcccagtacggcgtagttcccgtggaaaactcttcggaaggctccgtcaccgccgtgatggatcttttcgtcacctctcccctcaaaatctgcgctcaaatcaatctgaacatccgcaacagcctgatggcggatattccgcgggaacacatccgcatcctgtattcccacccccaggttctcggccagacgcggaactggatccagcggcatttcccaaacgcggaactcgtggaaacgtcctccaccacgaaagccagcattcttgccaaggagaacgccgccatgggcgcggcatccctcggctgtccgctggccgcggaattgttcggcctgaacatcctggaagaagacgtgcaggaccagtcctgcaacaccacccgttttgccgtcatcggacgccaggaaacgcagcccagcggcagggaccgcacctccctgctcatccgcatccagcataaacccggcaccctggcggaagtagtcaactgcttccagcggcacaacaataacctgatacgcattgaatcccgcccgtccaaagtcatcaactgggaatacgtcttttacatagatgccgccggccacattcaggaatcccccttacgggaaacccttccggagctggagcagcactgctccatgctgaagattctgggcagctacgcggatacggacgtcatttaagcaggttcagccttccccccagcctcacaccattctgaacaaccatgaacatagccacgattgccgccctggccgtcactctgggacttcccgccccggcccagcagtccgccactaaaatcattacggaaaacggacagcctgcgctggccctggacgaacagttcgcagcccggctgcgcgacggcggaatgaagcagggttccccggccaccgttcccgcggaattttcggcagcagcgcccggcctccccctccctgcggatgccaaccatgccgctgtcagggaaacggcgggggaacgcaaccggcgcatggaatggtggagggatgccaaattcggcatgttcatccattacggcctgtattccggattggccggggaatggaaaggcaggcccggaggttccgaatggattcaaaaaaacgtggaagtggatacagatacctacgccgcggaagctctgcccctgttcaagcccagggaaggcctgacggaagaatgggcccagctcgcccgggatgcgggctgccaatatgtagtgctcaccagcaagcaccatgaaggcttcggcctgttcgacagcgccttgacggattacgacgccaaaagcgccgtgaaccgggatatcatccgcgaatatgtggactcctgccgcaagcgcggcctgaaagtgggcctctaccactccgtcattgactggcatcacccgtcctatgacaacaccatctgcccggacctctgctaccctgcgggacaggcggcaatgcttaacaggaaaaacattccccgcgaccacgccgcttaccagaaatacctgcacgcccaggtccgggagctgatgacccgttacgcgcccatcgacatcatgtggtgggattactcccagggagccatggagggggccaaaggctggaaggcgccggaactgatggacatggtgcgctccatcaatcccggcgtcatcatgaacaaccgcctgtacgcttattccggcctgaacaaaaaccaggccggcacgctggacctgcgctgcggggactatattaccccggaacgcttcatcccccggcgcggatatcccggcgtggactgggaatcctgcatgactgtaagcgacaaatggggctacaaccgctacgacaccaacatcaaatctccggaaaccatcattgaaaaactggtggaatgcgttaccaagggaggcaatcttctgctgaacgtcaatcccatggcggacggcaccattccggaaaaagtggccgccaccatgcgcggcgtaggccggtggctcaacatcaacggtgaagccgtgtacggcacacgggcattcatgcagctggaccagccggcctccatcaatcggcagggggatatcttcgtcttcctgattccgccgccggacaagggagcggcccagccgcccagcgaaggaaccatgaaagaactgacggcgggcgcggaacacgcccgcatgcagccgctggacgccaccggttatgaagatgatgagggaacggccatcaccctgcccgccggctattccaaagcattgcttttgggggacaacgccgtccttcccgtcgtcaacggaacggttctgttcaaggctcatgaacattccaaaaccccctgttccgtcatcaaactgagcaaatagccattttctccactcatttttcctatggaggaagaccttttttccctggcagccggcaaacagccttcacagcaggcaacaaatgaaacggcatcccgggctggggaggcgcgggaaaacgccggcgccggccaccccggaaacgcggaggaaaccgctcaccgccgcatagactaccttcgtgccgaactgcgccgccacaaccgcctgtattacgaacaggcggaaccggagatttccgacgcggaatatgacgccctgttcctggagctggaaaaactggaagaagcccaccccgaactggcggatccggactcccccacgcgccgcgtaggtggcgcccccctccagggcttcaaccagattaggcatgcggtgcccatgttgtccattgacgacatttttgagcagcgggacgccctcgtgccggatgaagaactggcggaattctaccataagctggccagggcgctgcaaacggagaaagttcccgtctccgtggagcccaagattgacggagtggccctttccatcatgtaccgcgacgggaagctggcttatgcggccacgcgcggagacggagacgttggggacgacgtaacggccaatgtccgcaccatccgcagcgttcccctcaccctcccccccggcgcgccgcccgtgctggaagtgcgcggggaagtcttcatgcccaatgaagccttcgccaaactgaacgaagaacgggacgccgacgggctccccgcattcgccaacccgcgcaacgccaccgccggaaccctcaagcagctggaccctcggcaggtggccgcccgaccgctggccttcctggcccacggattgggcgcgtatgaaggcccggaactcagggacgcaaaagatttctggaacatgctccgccattgcggcatcccctgcaatgagccggtgtattacacggacagcctggaatccacgcgccaagccgtgcgggatattgacaggctccgccatacgctcccctacggcacggacggagccgttattaaaatcagatccacggctacgcgggaagcgctgggagctacggctcgcgcgccccgctgggcggcggcgtataaattccccccggaacagaaggaaaccaccctgctgaatattatcgtgcaggtaggacgcaccggggtgctgacgcctgtggcggaattgcagcctgtgcttctgtccggttctacggtagcgcgggccaccctccacaaccaggatgaaatcgaccggaaggacgtttgcataggcgatacggtgctggtggaaaaggcgggggaaatcatccccgccgttctgaaagtgaacctctccaaacgcccggcggacgccaggccctacagcattctggaagccacgcgggggctgtgccccgcctgcggcaatcccatcatgaaggaagaagggaaagtagcctggcgctgcaccaacttcacctgccccgcgcaggccgtgacgggcatcactcatttctgttcccgttctgctctggatgtggagagcatcggctcttccgtggcggaagcgctgagaagctccggactggcatcctctgcgctggaccttttctccctgactacggaccagctcgccaacctgaacctgggcacgccggaggaaccgcgccgctatggggaaaaaaatgcccggaaagcgctggacgccctgcaaaacgcgcgagggcttccgctggaacgctggctcatcgccttcggcattcctctggtgggggaagttgtcgccaaggcgctggcggacacgcatcccgacctgaagcatgtggcggattctccctacctccgggacatcgtccgcctggatgaactgatggaaaaagccgccaaaaccaaccccaacacccgcgacaataaaaaggcggtgaaggaaggcgcgctttccgcagaagcggtacaggaacgccaccaggaactgatggaggaaatcgaccgcctgactgccccctatctggcaacgggctacctgcgtaaaaacacggccaaattcagctatggctccgaaataggcgtggcggcggccaaatccctccggaactttttctcctccgcagcagggaatcacaccatggacgtcctgaacggattgggcatcaatccccagtcccagtcctaccgggccaactttctggaaatcccggcgggatccctgtccggaaaaaccttcgtcattacgggaacgctcagccatccgcgggactactttgaacagcttatcgcctcccacggaggaaaggccaccggagccatctccaaatccacatccttcctcctggcaggcaacggaggaggctccaagcgggacaaagccctcaagctggacgtgcccgtcatttccgaggaagacttctacaaaatgattggaaattaattgccgcaaaacagcgggaacggaaagcaggaactgaaacgcgcgcatcatgcgtccggctgcctgtatcttcgtattcccttctcttttttccgtgcgccgttttccggaaatttcattcccgaatccagcaaaaaagcttgctacgggcagacatctgtcccctaataaaccggtatgctgaacctgcccaatgccattaccctgacgcgtattgccctggtagtcgtctttacggcagcagtcagcgtcgcggaccagtattcctggggatacctggccgccctggtcacgttcattctggctgcctgcacggactggctggacggctacctggcccgccgcctgaaccaggtcaccaccttcggcaaactgattgaccccctggcggataaaatagccgtctccgccgccttcatttacctgacgggggaagggctctgccccgcctggattaccattctcatcatcagcagggaattcctggtcaccggactgcgccagatcgcgcaggatcatggcgtcatcatccctgcgggaacgtccggcaaatggaaaaccgccttccagctggccttctgcatcgcctgcctgctggccctgacatggacgcatacgccggaatacctgccctccatcgcggaccggctggccgcgctctgcctgtggcacggttccggcgcatccaacttgctgtaccaggttacgctgtggggctccgtcatcctgaccgtttattccggagccgtttactgcgcgggcgcccgcaaattcctgcaacgctgaacgttgtcttttccccatccgtcaggagagtgaaacagcatttttcattttccagaatattccgtatcccgggcgcatgatttcattccgccaggctctagatgaaagaacgcacacgctgaaccttcctccattgattttcgtgcacatgcagaaaaatccctcccccccttgaagccatccatcctttgttccgggagaggagtgcctgtacagctctcaagcctctttacctgtccctgatatgacgttcctcaaaaatattgaggggatcatcgtgcttggcagtgggtttgcctccggtactgcctgatttttgtttaccggccttttcccataatctttccagggaaacaggagttccgttcaaatcataccggccaagagcaaactgtttactgtctctgtcaaaatagtaattgtaacaatcctttcttggataacagaaagactttttgttcggggcggaagcaaaaaactgtaatgatcccgcttcagaatcacgaatcgaaatctttccttcttgatcaacgcaaagaaacaacgaataaaagataccctttcgagcatcataactgtgccatcggctccaagcgtcatcccttccctcctcaccccttatcccgccaaagagaagctccccgtcttccttccgttcaacaaaagtctgtacaatatataaataatctctgctgttttccctgtaccacgcaacatattttgaatcattctttgctttcctatcaacacgaacaccaaaaacaacctttttctcatcattatcagcgtacaatgtgtcttcctgttcaaaagttacatatctttcatccaatttgtaaaataattcctgcatgacactcttccattgaggttcattggaatataatggggttggcagatactccccggtaaaaaggtttgtacgcatggaaatagacttcctcttttgcaacattttctttaaatatttcatattgaaagaattatcttctttcacaaaatccaccggatatttgtaatgatacgaatttgcctgttcaaaaagagcatcaataacattttgataatattttatccctgcctcaggagtaaggcgtttttgtttcgcttcagcaagaaatctgacaaatggatgctccttgccattcctgccggaatccggaaaaccggcttccccgccccggttttcctcccgcgtcagattattcaataaccgctgatcagcttctgaaagtttttccagtaaaatggttttgacctttcctccattcacgaccagctgaattttattacccacccttccctcatacgttgcttttaactgatgccccgtcaccgctgtccaaatccggggcttgcttaaatccgccctttcttccgattgaaaatccgcaaagagagggctgccgcaacatacggccaatacggaaaaaatgaccattccattctttatttttgttttcaggggcataactcatttaacatggtttatccaatgaataaatatacggataaagaatccgctgattggaatatgttgtctctaatatggcagcctgcatccctgatgcagatgaaacctgaattggaataggaacaggacctcttgggcgctccctaaattgttcaccaaaaatgaatcaggccattcatgcgcagaatttagggttgacggcggattctttatccgcttcatctaataattcatttatactcagtttttataaaaaattcatgacaaaaaatgtttctaaagcagaggaaaggcgcttccaggatacagccgcgtgccggaatacggagccatgacagagcaggcgtttttatttttcttgacagatgctcttcgtcgtgttctgatgaagccgttcccgccgaatggtgtttggttgttgattgttgatagtcatttgcggttggcggaatacgggcgtccccgtcttgaccttttcagtatcgctcctgcgggcttttttgttccgttattgccgtgattccgtcagttcattgcagccgaggcacattcacagacacatccacagacatggtatcaactacattcagggagcttggcttgtcggctcccattctccgccaactggagaatctggagtacaagacccccactcccatccaggccgcctgcatccccctgttattgcagaacaaggacctgatggggctggcgcaaaccggaaccggaaaaacggccgcgttcgccctgccccttattcaacagctttcagaacgttccggaaagccgccgggccgccgggtaagggcgcttattctgagtcccacccgggaactggctgcgcaaattcatgaaaatatccgcgcctacgccagagggctgcacctgtccaccgccgtcatcttcggaggcgtggggtatgtttcccagttcaaggaactggccggaggcctggatattctgatagccacgcccggcagactgatcgaccatctggaacgccggactgtcagtctggacagcgtggaaaccctgattctggatgaggcggaccatatgctggacatgggatttgccccggccctgaaaaaaatcgtctccaaaatcccgaggaaacgccacacgcaaatgttttccgccacaatgccggacaatatccggcaactggcccagaccctgcttcagaaaccggaaacggtgagggtctcccctccctcctccacggcggacagggtggaacagttcctttgcatggtcggctcccaggcggaaaaaaggccccttaccctggaactgctgaaacagcaggagctgcctggccgcacgcttatctttacccggaccaagcatggagcagaccgcctggcctccttcctgtccggaaaggattatccggcttccgccattcacggggacaaaagccagggcaggcgcgaacgactgctccgtgaattccgttccgggaaaacgcctgtcctcgtcgccacggacatcgccgcccgcggcattgacgtaaaagacgtgcagcttgtcattaactatgacctgccggaagaaccggaggtctatgtgcaccgcatcggccgcacggcgcgcgccggagccgccggacaagccatcgccctctgttccccggaggaaatcaggaaagccagggacgtgcacaagctgttgggacgcctccttcccgtgcacccttccagcgcctccgtcccggatgaattgcgcgcggtcccagaagcgcgcaggaaaaggagcagttccatgcaggaaaaacgttccgctccccgcaggaagccgcggaaagggtacggaaggaacggcagccgtgcggaagcatgattttaatcattcaaaaaacttttgaacggaattgaagtcagcgcggtctcacttgctgcaaacggttctcctgatcgttccagtcgggaaacttcaaccggagtttcaatcatgaaaataacctcgttcatcatcaggacactatgcgcgggcaccgtcggttccctcgcctgccaggccgccatgcaggcttacgcggatgacgttccctccaccttcgtggaaggaaattattccccggaagtagcccgctacgtgcagagcatcgcaggcgtggcgctggcctcgggcattcatgatgatgacgaaaacgctaccagcagttatcaggttctggcccaggttctcaacagcggcaatgtaacggaattgccggaggatctgaaacgggccattgggatgctgatcagctacgttcccgacccgaacgagatcatccagccggtcctgtccaaaaaacagattgagaggatgaggaagatggcggaccgcatcgaaaacctgatggaggaaaaatacggagtggacctggaagactgcatgaacatcatgaagcgtgcactggccccgtccatcccggacatcctccgctcctgcggcatggaaggctcccggctgcccgccaccaccgctttccgccccaggctgggcaaggctctgaatgaggcctatgccaggcttgcggctccacaacttcccgccgccggcatggcgccataaccggaccatctacggatgatcgggaagatgattccgattccacggcatgcgggccccagccagggccccctggatagaagccgcaggaaacggaatgatcttccccgtcgccgggaacggaaacggcagccagcgccggcggcaacaaacaacaccctccggatgtcctccgatgcagggccgatccttcggaacgcggagcggcgatacgcccgctcccctgctttattcccaagcaacggcatgcaacatcggcacaaccggatgatgcccttacaggccccgtccttcccgcgctgcggcaggaccggggcttttttcatatccgggattttcaaaaggcggcggcataccctcctgattccctccaggaatcagggatattccgtttttacagaggaatgcattttttcatcatctgtgaaagaaagcttctcaagcctcagtatttatggcaaactagggattcaaatctttcacaaaattaccatccatggataattcatcatcacgccgtcgtttccttcagaccctgggcctggccactggcgccctggctgccggttcctttgccaacgcccaggaagtagcccccctggctcccaagaaaatcaccattccggacccgaataacatcggccccatgaccacgtggcccccgcgcaagcccggcgccatctacatgggcggcttcagggctcccaagctggacaaggtgcgtgtggcctttgtcggcgtgggtgaacgcggttccatgcacgtgggccagatggccgttatagaaggtgcggaaattgtcggcatttgcgacctgtatgaagactgggccaagcgcagtgcggacgtcgtggaaaagaaaacgggcaagcgcccccccattttcacgaaaggaccggaagactacaagcgcatgatgaaggaagtcaagccggacgccgtcatcgtctgccccagctgggaatggcactgccgtgttacctgcgacgtgatgaagatgggcgcccacgcctttgtggaagtgcctatggccgtctccatcaaggaactctgggaaatcgtggatacctccgaagaaaccaggaagcactgcatgatgatggaaaacgtcaactacggacgtgaggaactcatgtacctgaacatggtgcgccagggcgtcattggcgacctgctgtacggagaagccgcctacatccatgaactgcgcggacagatgaagcaggcggaacgcggcaccggttcctggagaacctatcactacgccaagcgcaacggcaacgtgtatcccacgcacggcctcggccccattgcccagtacatgaatctggcccgcaaggacgactgcttcggcaggctcgtgtccttctccagcccggccctgggccgcgccgcgtatgccaagaaaaatttcccggcggatcacaagtggaacaagctggactttgcctgcggcgatatgaatacctccatcatcaagaccaccatggggcgcaccgtcctggtggaatgggatgaaacaagtccgcgcccctactcccgcctgaatctcatccagggcaccctgggcaccctggccggcttcccgacccgcgtagccggggaaaagctgggcaacggaaattatcatgaatggattgaaggcaaagaaaaactggcccccatttttgaaaagtacgaccacccgctctggaagagaatcgggccgctggccctgaaaatgggcggccacggcggcatggacttcgtgatgctcttccgcatcatcgaatgcctccgcaatggagaaccgatggaccagaacgtttatgaaggagccttctggtcctccgtctccgaactttccgaatactccgtggcccagggcggcatgccccaggtgttcccggacttcacccgcggagactggaaaacgaccgctccgctgggcatcgtccagtaacaaccggcgacttccccggcccggagcttttccgcctccacggcgggcttctaggccggggccaatgccctctttgcaaaaaaacaggcccagcttgcaagcggcctgttttttattgcgtcaacgacatcgaattccggaagttgaaagacgctgcacgcgtttcacttgtccggaaagcccccgtatggcgccaaaaagcggaattccgtgaaattttctttctccgctgagccgtatataaacgtgggaaacatcccgcagcgaaccgccgttccctttacatcgcacacgcctccatgctttcctactgcaccaatattcatcccgccgaatcctgggcggaaaccagggaagcccttttcacctgcgttccccgcatcaggcaggaactcgtggcgatggactccccgttgaagaatctccctctgggcatcggtctgcgcctgtccgccagggcggcggcagaacttctggaaacgccgcacgcagcggaaaccctgaaatcatggctggttgaccagggcgcgcgcgtggaaaccctcaacggtttcccttacggtcatttccacgggcagcgcgtgaaagaacgcgttttccagccggactggactacgccggaacgttttgaatacacctgcaacctgttccgcattctggcactcattggagacgaacaggctgacaggctgaccgtcagcacgctccctgcctcacacagctggtttcatgcggatgaagaacgtatcttttcccggctggacgccatgagcggcttcctggatgtgctgggcaggcagaccggccgactgatgcagctggggctggaaccggagccattcggccattttcacgatacggatggagccatccgttttttcaacggccttcgcaaccattcccgccgccccgaactcatcgaacgccacctggggctgacatacgatacctgccatttcgccattctccgggaagagccggaagccaccctctccgcctgggaggaaaacaacatcgccctctgtaaggtgcaattctccaacgccctggaatgctgcatatgcggaaaagaagatctggaacgcctccagcagtttgatgacggcgtttatttccatcagaccagcatccttcttcgggaaggcgtcatgcttttcccggatctgcccaatgccctggcctatggacgggactatgcggaggaaatgcgggattcccaatggcgcatccattaccacattcccctgtacgcttcaccggaaccacccttgaaaggtacggaagaattcatcctgaaaacacgcaatttcctccggggccgcaaaggcccgcagccgcatctggaagtggaaacctatacctggagcgtcctgccggaccacatgaaaatccccctggcagcccagattgcccgtgaactgcattacattgaaactctgtaaagccatgacgccccgcatgtatccctacgccgttctgtcctccggattcctgctgctgtccaccggtctttcctcctgcgcgttgctttccatggtctcctccggaggaccggaaacgccgcggaccctgggagcacgcatggaaaaacacacggaggttctgcaaaaagatatcggggtcagaaacgccagccagcccaaatccatggaagccgccgccgaatacatcgccgggaatttctcggacatggggtacgccgtcaccatgcagcccatatccgggggaaacgcggaaaaaggagcagccatttacaacatcctggtttacaaacccggcctgtattccaacaaccagagcatcgtcgtgggagccaattacgattccagcggacggcgcaacaacggcagcggaacggctctgctgctggagacggcgcgaggcctgaaagacattcccaccaatcacaatatctattttgtcgcgtacgcgaatggagcggaacccgcggggaaatccatctcatccggagcctgcgtgcatgccggctccctgagcggcaacatcggggcaaccaatatcctgggcatgatcaatctggaaccccagaagctggatgccggcggggaacgaaaacagacgggcccggaatccacccgggaagacgttctgttcatgaccacctcccacggcaggaaattcgcaggccagtgcgccgcccccttcgccaaatcctgggaacaggcgcccactaccttacaacgggaaccctccgctctcacaggcaacgaccgccattacgcggccctgggcattcccacggtctcctgccggtgcaggtatcccgttacggacgcccgtacggaagaatatgtgcaggcactgacggatatgattcaccaggtagcggacaatgacgcgcccgaaccggcaaaaaatgccggccgggacgaaaaagcatcctgacatttccggccctccccgttaccgggacagttttcttcttccgtggccgcccagcatcagcacgggcatgaaagaaagagccaccagggcaataaccataggcatccaattgtcggaatacctctgcatcaggaacgaagtcagggaagggccggccagagtcccgacggaataactcagcagcagaagctggttcatggtcaccagttcatcccgggaggcttcctcgcatccccaggccatggcaacagggtacagggaaaatccggccagccccagagcaatcagggagggggccatcagccctcccttcagcatcagccctgcacaggccgccgccaccagcagggactggcacttcatgacgaatgagcggccgtacctgtccgccagccgtcccatgggccactgccccagaatggcagcggcaatcagcagggccatccagtatcccacggaagagtggttcatgccctggtgcttcaaaaacagaggcatcaggcaataaatagtacccaataccacgccggaaatcacacatcccacaatgcccagaaatacgctgcggcgtctcagcagtatccgaatctccacatgggaggaagaagaaatctccccatttcctgattccagacgcgcaaacatcagcggaaccatgcccgctactgataaaatgcacacttccgttgcaatcagggacatatcgctggggaaccagcccagaagcaactgccccagcaccgtacccagataataaaccaccatgtaggaagccagcagaacgccgcgggtctgcagcgttccggccctcagcatggcgctctccaccaccacccagaccagagcacaactgatccccgccagcagccggagtccgctccaggccggcacgccgggaaacacaggcagcaacacggtggacaccgcgcataaaaggcatgcatattggtaacttcctttgaatccggcccggcgaatcacgccgccggccagcagcgtaccggccagattcccgagaaaaaagaacgcccccaccagtcccgcctcccaggtggcggcatcaaattgctccatccacaggggaacaaccgtattcaacacggcaaacgccactgtctggaaaagaagccccgccagcagcagggcaataggccaggtaaatgcacgcatcacgataaagcggggactatagcaccaaagccgcatcagtcaaccgcctcttccgtcggaaagaaaaacaaaaaaagcgccccatcaacaaaagacacaatacattgattgttaaattattaataaacaattcaaaatataggggactgtcatattccccggcgcagggaagcgggcagtatcttcatctgctcccggtacttggctaccgtcctgcgggcgatgttcacccctttttcccgcagcgcggccgccagaccggcgtcactgaggggtttggaagaatcttcctccgcaatcagccgccgcatcagctcctggacggctccggaagctatggctccagaggccgctccgtccagggaaatgccgccttcagacggaactcccgcgctaaaaaaggacctcagctctttcatcccccacctgcacaacaggtatttgtcccggcacgcacgggaaaccgtggaaacgtgaacccccatctcctccgccacctcttccatgcccatggccttcaggcgggacgggccggacctgaaaaaatcctcctgcctccgcacgatgacacgggccaggcgcaaaacggtctcctgcctcatgtccaaagcccgcaacagctcctgtccctcccggaacgccctgcggagatactgcctcagctcccggcttccgctcccctccgccatcaactccatataccgttcattcatggacaggcgcggaagatactcggaagtgagggcaacctccagcacgccggaaggaccctcttccacaataacgtcaggcagcagatgagggttgccgccaggggcgtaggccccccctggatcaggagtcaggcttctaatcacatccagggcttccgccacggcctccggttccacgtccagcaggcgcgcggcttcttcatacctgtgcgccaccagttcccgccagcagcgcttgaccaggcggaaagcaagcgaacgcttcaaaccgcgctgttcaagctgaatcaacagggaatccctcaaatccgccgcccccactccgggcgggtccatttccctcagcgccgccaaggcttcctccatgtcccgcatgctgaaacacccctgctcttccagctcctgcggagactccgtcagaaacccgcgttcgtccagagcatcaatcagcaggaacagggcgtcccgggcgcggcccgtcaatgcggaatgctgcgcctgatccatcaaatgggttttcagggattccggagccactacggattcatacatgaaatcacggcgggcggccgcgtccgcagaaaagcgcccttccgccgtaaactcgttccacccgtcctcccgttcattcctgtcctccccgtccggaccgtcttccagagcttccggggaggcatccggcaattcctcaagcatgggattggtttccagcgcctggcggacaagctgcctcaattccaaagcggaagcctgaagaatctgcatccctgtctgcatggactgggagacggccatctggcgcgtcattccatgctgcagggatacctcactcataccgcccacaagctacaccaccccccggaatctggcaagggggaacaccctgccgcaaaagctgccccataccgcaacaacggaaaaagccattactttcatgtggcgtttttgaaaaacgtccgtacaataaatgccgatgaagagcttgcatatactagctttctccctgctggcctcccttctctcaacagctgcgccgtcccctctgactccgttgcccagggaacaaccccagtggtggaggaagcaatatgaacaacaggtggaacaaataaaaaacaacccctgcggcgtccttttcctgggagattccattacggactactggaaaagggaaggaaaaccaatatgggagaaggcattcgccccctatcatccctgcaacttcggcatttccggggatcaaaccaccaacctgatttaccgcatcacggattccggcatcccggcgcagacggaccccaaactctgcatcgtcatgatcggcaccaacaatacaggtcatttcaaaggaggggaagccccggaaaaaacggccatgggaattctgggtgccgttgaacacctgctggtcaggttcccggacacccacgtcctcctgctgggcattttcccgcgcggcacaggcccccaggacaagctgcgccagcacaacgaccgcatcaacgccattctggcccagtgcaagctgccccgcaccacttacgccaacatcaacaggcgctttctggactcctccggcaaactgctccccggcatcagcagggacaacctgcactttacggaaaaaggctacgccatctgggcggacgccgtgctgccctatatcaaaaaatactgcaaatagcattctttcccatcctcaacgcatgactgtcggaatgcccccttccgccagtcatgcgtgcggttcgggaacatatttgtcaatcaatgatgaagcttacgcagcaacaactgtccagccttcattcttgaaactgcggtcatggagcctgaaaagcaccgctcatgtccatcaattcatttttcccggcggctccgccttgaatgcttatgagtaacatccggactttgggtcgcccgctttaataaacggttaagatataaaagcagtacggtacatggaaagtatttaccgccaagcccgcaaaaagctgcatggatgccagggcccgcgtctgaaaattttgcgcagaaccgaagttgcagttgatttggaataaatatattataatgagacaatatatcatagacgcctttactgacaaagtttttcatggaaatcccgcggcgatttgcattttagaacaatggccgtccggggaattgatgttaaatatggccgttgaaaacaatctttcagaaacggcctttgctgtcaaaaagagggggagctatcatctgcggtggttcacccccggtggagagattaacttatgcggtcatgcgacattagcctgttcctatgttattttgaacttctatgaaaaagaagcggcaaaagttgtttttcaaactttaagcggtgatttggtggtagaacggcatggtgatctttatgaaatggatttccccgcctatgaattaaaaccagttcccgtaacggagcaaatgatcgacgctatcggtgctatccccagagaagcgtatatggggcgcgaccttttatgcgtgtttgacgatgtaaaaataatcgaacatctcaatccggatctatcaaaagttcatgccctgaacggttttttgctccatgtaaccgcaaaaggtgcggaaactgactgcgtttcccgtacctttgcccccaaatgcggagtgccggaggatgccgtttgtggttccggtcattgtcacattataccttactgggcgaacagattgggaaaagacgacatcataggttatcaggcttccaaacgcggtggaacactttattgccgcatggatggagcacgggtaaaattagcaggaaaagcagccttatattccattgccgaaacacaatcaaaatgaagcgtcaataggttaagaacatatgccgggcgacgagaaaaaacgtcgttcgacagaaattatacattcccaatgacacaaacggcggttttgaacaatcaaggccgccgttcttctattccctaaaaaataatgcaactatgctttcaaacatggcggccaatgggaataactgccatgaagcacaaagcatgccgacaaattccgacgagatctatatcaaaaaatacatccgccgcagaatatcatatctccaaacgtgaatcataccatgtagcaaaagtgaatattttttcaaacttccatccggtatgcttgtgtctttacaggtgtgtttttataggaaatacaacaaaaaatcatgaaacaaccaaacctctcggccggaagcaggaatccagccgacccgcctgtgccgcatttggaatcaggaaaaagcgcaaggaacaaaaaaattgctttttcccggggatatcctagagtgcctctccgcaatgagcatgccgcttgccgacttgatcttcctggcttttgccctctccgtggacgctttcgtcgtggcgttctcctacggcctgctcattaagcaaaagcgtttgagcaacggaatcaagctctccctgtccaccggggccggtcaattcctgatgcccgtgctgggttttctgcttacaggctccgtgcaccggtatattgcggcctgggaccactggctgggcttcgccgtgttcaccttcctcggggtcaacgtcctccgcgaaggctggaatcaccgcaacgaagaagaggatatgccccacgtcaccagcctgacgtttcctacccttatggccgtgggaatcgccaccagcatcgacgcgctggtagcgggcgtcagcatttacctttcatccgcccagtgtggaaccgaccctaccctcaacgcggtgcttctccccgccgccgccatcggcttcaccaccttcctgtgcacggcggccggctttttcctgaccagacggctgcaccgctttccgacctttcatctggaagcgggagccgggctcatcctcatcggcttgggcgtcaaaatgctctgtgaccatttgtgctgaaatatgccgcgaaggatgataaaaacgtccttccggcatcgtaataagtcgaaaaacgcactggttccctcccacctctttctgctattatcaagtaatcccttccacatgaatatttcacatcttcttctctgcacttccctgctcgcggctcccgtctgcgcggcacagggcctgacggaaactgaaacggaaacgccggcctcctccagccgcctgccggcgcccctggcacaaaaaattgcctccggagactttgatggcctgcagacggaactgcgctccaccctcctgaaggctggagaacaaacgaaatccgaacagaaactgctccagaacaagcagtaccgccatttgctggacattcacgaactcctgcgcgtcacgggaccggacaaggtgaaagccgttttctccaaaagcgcgcaagatgccgctttcatcaaaacctttctacaggacccggcgtggatggagctttaccttggagcaggcctgattccggaaaattcaccggaaggccttcaaatcctctccgacatctggaaagcggacggcaagagcccggatttccggaattaccaatccctggccaccgggctggcctctgtcttttccaccggccccatggcgggaaggctcaaaaccaactccgccaacagcaatccggtgcgccgctaccggattttcaaaaaactgcatcaggaaaacaaactgcatccgggattcatcaaactgcgcccatgggaaatgcgcttcgtcgtgggaagtccctgggacgataaatcctatgaatggagcaatgaacacgtcaacctcccctggcggcgatacacggccgcctgctgggccgctccctatacgggccacaatttctttggcgataccattcaggggccccttttctacgtgccgtggagggatcttaacacgaccgcggaaaacacgcagatcatcggcggcgtttgcggcggcctctcctattttggcaccatggcggcccaggcccacggcatccccgcttatccggtaggacaaccgggccactgcgcgtacgcggtgcgcgtgaagcggggggaatggaaaggcggcttcggcggaccagacggaggcatgcacaaccatatcttcggctcccaggctccgacttcctacctgctgatggaaaatgtctttgctgacaacgataaggcggaccaggcctacctgtgggccgcccaggcccggctggacgaggcttccggcaacaaggacaaggccattcaggcatgggaggaagcgctcaggcaaacaccgctgcacccgttcttccgcacggagcttcaacgcctgctgatggaaaaggaaggcatgcaacctgtcgactggtacgtttacgccaaggacgccctttcccactatcagggcaacggctttgccgcattcgacatcctcaaggacgtgcagaataaattcctgatggatattccgcccgcagaccggattgcctggttccgggacctgcatgaagccatcgccaccactcccacatcatgggcggtgaaattccagcccgtgctggactcccaatccgccttcctggcaaatccgcaggaaaaagcggcctatctggaaacagtcctatccacccacctgaaaacgggggacggcaccaactttggccaggcattggaatggggcgtgaaaaactttgtggaaaacggacaggcggacgtgttctccaacgcattcgccaaggtagcccagcaaacgggaaaaaccgggacctccgggaaagcccccgaccccaaaaagctgaaggaagcctacggcaaagccatctatgccacggaaacggcccgctccattccggccttccaggccttgagcaaagcggcggcctctttctccggcgccaatgcgacgaacaatacggtcaaggcgtccattccgcagggctggaaactggtgcccgcagacggcatggtccggtgctccaccacgagccagtgggacagcccctgggaccatatcaacctgctgcgtccctgcggcggagcccagcatacggataaggaagccaatccgaacgtcattgtagaactgaaaaacggagtgaacctggccgggctggtagtcaccaagcgcgacggcaatgaaaaccggatgaagaaaatggaggtctccacgtccacggacggagccacctggttccccctggccgccacggaaaacatgcccaaggaatgggtcatcaccgctccggaaggcaccaaagccaagtggatcaaggtggaagccaaaaacgcacagccggaattcatgcacctgcgccatatcctcgtttacgaaaaataaattctccattaacgccatgcttcatcacatcaatcccgtttccggcctgctggccgcagccctcttcctgtccgcccctgtccaggcggccctccccgcttacagcgccgtgaaagacgaggcgaaaaccgtcaataaatacatgatcgtcgtatgggccggcacggactggtccccaaaatcacgtgaaatcacccgcgctgtggaacacctggccaagaacaccccggaacccgtgctctggtgtatccaggacgagcgtgaggaaatgacggaagaagagcagaaactgcccaagcccccgggggaaatctggaacatccccgcccttcaggtggtctcccccaccggaaacatggtattcctgtcggaaggcgtctccagggaaacattgccagccgtcatgaaacaggcaatggaagccgtaaaacagcaaaacaaggccaatgccctgtgggaaaaagccgccgcttcatccggaacagccgcggcccttctttacggagaagggcttcagcagcttcctccttatgcggcctctgccagaaaggatattctggaaaaaatcaaaaaggcggatccggaagacatcaagggagtgcacttcaaatacacgttcaggcatctgccctacatcgaaaaagtgcagagaatggtgaatgattccgccaaagacggcggtccaaaggattacaaaaccgcccatgcctatgtaaacaaacagctcaaaacccccggcctgactccccttcaaaaacaacaggtcatggcggccaggttctggctctaccgcaatgaggggaaaaaggaccagacgctgaagaccctgacggacatcgccaggatatcccctaaaaccctcatgggaataggcgcccagaactactaccgctacctgacggaacccgtcaccctgaaaagtcctcacttcacaggctacgacctgcgtccggaactgacgcctacccgcgtcaacgtcagcagcatgcttgacggccccggaaactacaagattaccttcaagatgaacagcggcggctgcaatatccgcaacccccgcttcatgaagggcaaccgcgtagtcagcgaactgcccaaggaccggcaggacaaaaacgggcgcgaattcaccctgcgcctctccggttccgaaaagccggacttggttttcgactgccagggccacggatggttcgatgcggactgcgacatcattgtgaccaaggaatcctgattcctgctggcaaactaacaaaaccgccattcacaaccttcacgaaggcaggacattcccaaggaatttcctgccttttttccgatgggagaagaatttccagccagcgcccaagcggaagcagccctctctccctgcttcttgccggccaaggccgaacaacattcccggcagcttcaaaggagcaatcagggaaaccttcttctcattcccgcgttttcaagggagaattaccccttcttcccgccttccccggcgttctccgccagttgacggcggtattccatgcgttccctgatcctcagttccagcccgtttccggtgggggtgtaatacacgcggccttccgggaggtaggcctggggtacgtaatgttccggatagtcgtgggaataaaggtattccagcctagcggcgtccacgcctccggcggcagccagcttcttgcgcgttggcgtccgcaggtgttccggcactgccagcgttttcccattgcgcacgtcatccatggcggcattgatgcccacgtaggcggaattgctcttgggggccgtcgccaggtaaaccgcagcatgcgccagaggaatgcgtgcttccggcatgccgaccatttccgccgcgcgcgccgcgtccaaagctacgcgcagggcgttggaatccgccagccctacatcctccgacgcggcgatgaccagccttcttcctataaagcggatatcctccccggcttccagcatcatacccagccaatacagggcggcgtccgggtcagagccgcgcatggatttgatgaaagcggaaatcgtatcgtaatgggaatcccccaggcggtcgtatctgatagccttgcgctggatggattcctccgctacggagatgtccacatgaatgacgccgtctttccccgcaggagtggacagaacagccacttccagagccgtgagcgccttcctggcgtctccgtccgctttggcggccaaatggttcagggcttccgcctccatatccacgcgggatgcgcccagcccgcgcacctcatccgccagggcgcgcttcagcagggcggccagctcctcctccggcaccggctccagcggaaaaacctgggaacgggacaggaggggggagttaatcgcaaaataggggttttccgtggtcgccccgataaacctgaccgtacccttttccagatggggaagcagaacatcctgttgagccttgttgaaccggtgcagctcatccacgaaaagaacggttttccgcccgtgcatgctcatcctcatctgcgcctgggctatttttttccggatgtccgctacattggattccacgccgttgagcatcatgaaatgggcattcgtcgtccgggcgatgacggcggccagagtagtttttccgcacccgggaggcccgtagaaaatcagggacgtaaaccggtccgtctcaattgcccgtctcagcagcttacccggagccagcagatgcttctgcccggccacttcatccagggtgcgcgggcgcatgcgcgcggccagcggcatggcggaagtgtccgccccgggctcaaagccttccctcgcttccgcttcctgtaaactgaacaaatccatcggaaacactttacccggttgaaaggccggagaaaaggccaatccccggaatcctgaaagtttggcggaagcgacaccgttcccccctcaggacggaaaatgcacctttatccaaacatggaccagcaggacagcatgaaaaccatgctgacaggagccaaaatgctgaacagcagccccgcaacagccaatcccctgcggttcacctcccagtaatgaagggaggcgatcagcatccagatgggaatcacaaccatgtggacgagagccagaagcccccagcctgccagcaccagcaaaaagagccatgactgcgagccgtccgcattattgctcggcatgacaaggccaaagaagcggtacacaaacaaaaagaagacgaatacggcaaaaggtatccatccccagcgggcttcctccttccggcgggccaaggccaattcaaaacagggatctttaaacgcaggccattgcttggcggaagaatctctgaaggaacgcatatcgcccgaagtctctattatcgcgcctttctcccgtcaatgatattcaatgccagtccggctttttcccgcagaaaattttttcctctaacaaatacgggacatcggcttcagccaattaccttattgtcaaaccaaaggactgtgaaaattcatgaaaaacttttgaccataaatcattttttcattcttcctccccccgctcttcttcttttcccataatgggaaaagtctttttgcatgatccaaatttcaacacccgtccaatttgtcatacacatccccaatttcccataaaaaagactgcctccgctacaggagcggagacagtccgggagtaatataaaaccggaaattacggaaggctacctgcccagaattcccttgaagtattccagcgtcgtcgccaggccttccggcaaagtatgcctgggctgccatccggcattgcggagcttgtccgcacaggcgcgggaatgcttgacgtctcccggacgttccggcgcatgaagcaccttggaggaagatcccgcagccttgatgatgttctgcgccagctcttcaatggtgatctggccgccgtaaccggcattgaacacgccggtgacttccgggtgttccgccacaaaggtcagggctcctacaatgtctttcacatagatgaaatcgcgcgtctgggagccgtccccatacacggtgatgtcttcccccttgacagctttttcaatgaaaatgggcacggccgcggcataggcacccttggggtcctgccgggggccgaagacattgaagaagcgcacggccgccgtattgatttttccttccgcccggaacatgttgaggtagtattccccgtccagcttggtaatggcataggggctcttgggttccgggtacatggtttccagtttgggcaccgtaggattatctccataaatggcggcggaagacgccagcacgatttttttgactccggcggcggaagcttcctccagcacgttcagcaaaccgttgacgttgatgtcgatgcattcgccgatcttgctcatggattccggcacggagacgagcgcggccatatggaaaatatagtccaccccctgcaccgcctggcgcaccagctcccggtcgcagatggaaccttcgatgaatgtgtgcctgagcccttccaggtttttgagatagcccgtgcgcaggttgtccagcacacggatttcttccgccttatcctgatagtgttccacaatatgggaaccgatgaatccggcgccgccggttacgagaatcttcatgttcttccgatgttggtaaatattgattaatagcggtccacaatggccttcatttcatccatctgcgcctcaatggattccaccagggccatctgcgtacggcaacggtccaggttgtgttccggacggtggattttaaaatacacgtcaccggacaggtagtccgtcaggaagcggatgccgcattccatcgtgagcaatttgccggagaacggcagcaggctcttttccagaggcgtcaggaaactcttggcggaactcaggtacccctgcaccagagcttcaaacatgaacatgcgcatcgtgaccttggagacgtccttttcatcttccgcggcgggagacgtggccgtccggatcatgtcgccgaagtcgtaaatggcggaaccgggcatcgtggtatccaggtcaatcacgcaaatgccttctccggttacatcgtccagcatcacattgttcagcttggtatcattgtgcgtacagcgcaggggcaattccccggatttcaggtaatccaccaccatgtggcagtccgcctcgcgggaaagataccagtctatttccttctgcacttccttcacgcgccccagggggtcggactggatggcttctttcagagccgccaggcgggaagtagtattgtggaaattgggaatggtttcgaacaagggctctccgggcaggtctgccgtgagcttctggaactcgccgaaggcgcgcgccgcttcctggcactgcttggtagtttcaatctggtcatacgtgcgtgcgcgttcaatgaacgggtacacgcgccagcagttgccgtccgaatccagggcgtacggcttgccgtccacggagggaaccagcgtgagagtgcggcggtaagcttccgggcactgttcctctttcaggcgcttcagagcgtggtccgttacgcgctttacattctccatcagggggatgggctgcttgaacacattatggttcacgcgctggaggatgtaacggatacgctgtcccgcctgatccacccagatgcagtaggtgtcgttgatgtggccgctgccgtaggagtaaccgtggacaaaatcgccgcggagatcgaacagggttgatacagccttgagatcgtgcataggaaaaaaggcttagttgagcttttcagggtatacgccctgctggataagtttgttgatgccttccacaaccatgggcttatcccccggataggtcatgccgaaccaggaggaagaagtgggaagaacggcgcaatccgcccggtccgcatgaatcagggcgtccaccacggtgggaataaagcattcgctcttgggttcctggccgtgttctttcaggaagtcaatgaaatgatcttccgtcagttcaatgaaggagggggagaacagccagaaattcatggaaaccagttctgagggatccaccggcaggcgttcgcccttcaggttgttgccgcgcacgacgccgtcttcgtcagcctggattttcacgaattcctccacgccgtccagcaggccgtccttgatggagcaaatgccgcggttcacgtccccgttgtcggagagggtgttcttcagcggatagccgatcatgccgtaatgggccttgccgggttcatccgtagtggaggtcaggaacttggcggcctgcacaaaagcatccgcaccgtaaaagtcatccgcattcactacggcaaagggttccttcaccacgtggcgggcggcacgcagggcgtgggcggtgccccagggcttttcccggccttccggcacggagaagccttccggcaggtcgtccagagactggaaagcgtaatccacctcaatcttgccggcaaaacggctgccgaccttttccttgaaaatatcttcaaagtcacggcggataatgaataccacttttccgaaaccggcccggatggcatcataaacagagtagtcaagaacgacttccccgttggggcccatcggatcaagttgcttgagaccgccgtaacggctgcccatgccagctgctaaaacaagaagtgtaggcttcatcatacgcagaccattatgaccaagcctccccgtttggcaacaggaaaatgccggaaaaccggagaaatccgcccgttaaaaaacgtaagagcaccaaagccccagcactacttttttgaaatcgtcccgcccgtagccgcaataccatcccaggaaaggctccacccgcagaccgccggaaacggcccacagcgcccccgtgcgcaccatcagctctttcaggccgttccttcccagataatcatggacaaagcccagggaaaccgtattcaccatggcgacggattcgcacagcaggggctgccaggtaacgccccactgggaatacaccccctcctggccggaatcatacaggagggagccgcggaaagaccaggaaggagtggggttccatttaagggaaagtcccggctccgccccgttcttcagagggcaggaatcataccgctgtccgttgacaaaaaaaccggccgtgcattcgtccgccagataatactggacttctccgtgcaaggtggtctggctgaaatggcggcgctgccagttgcggatggcgaaaagttccccgctcaccgcccaggaatccgacagggaggctccgccggaaatctggccctccaaggaatccccccccatcttttctccccggtggacataataggaacggtagccgccaagcatctccccgcccatgcggatgggggaacggccgtccacctccgtcaggggcggcggcccgtcataccccaggacggcctgcacggcacagcacggaatgatgaaaaacagcctcatgaaaaccgtttaacacaattcgctgcgcctctccaacgccaaaacggggcatgcacattctccgggcttggcaaaacgggaatctgcccttaccctctcgcgcatggttcatttcaccctgttcgggatacctgtttacatccgccccagcttctgggtggtgctggccattttcggcggcgccctcagcatcagcagcgtggaagatctcatttatccggccctgttcgtcattgccggcttcatcgccatcctgtcccatgaaatggggcacgcgctggtgggacgcaggctgggcggcggccagcagacgattgttctggaactcttcggcggcctgacaagcagccacggcatgcaattgacgcgcggaggcagggccctcatgattctggcgggccccatgatgaccctgctgctgggcatcatcagcctgtggctcacctggaacatcgtcgctcccgtcatggcctctcacaacctggacttctgggacctggccatcagccccttcacagcggcgctcatctcccccaagctgtacatcctctcctgcctcatcatgattggagaatggtggaccctcctgaatctgctgcccatctatcccctggacggcggccagctgatcgcccagtacatccgctcccccaggaaagtattcatgaccggcttcatcacggccatcctcatcggactgctcagttttcagctcttccacggctactttatccccatcttcatggccctcttcgcctacagcaattaccgggaatacaaaaacgcccccttttaacagcattccgaatttcctttgcgggctccgcccgttctattcaacaaaccatccaatatgtctcaacaaaccgcaatctcccctacccgcgcccaggattttcccgagtggtaccagcaagtcatcaaggccgccgacatggcggaaaattccgaggtgcgcggctgcatggtcatcaagccatggggttacgccatctgggaactcattcagaaagacctggaccagcgcttcaaggacaccggccacacgaacgcctatttccccctcctgattccgatctcctatctggaaaaggaagcggagcatgccgaaggcttcgccacggaatgcgccgtagtcacccaccacaggctggaagcgcagaaggatgaaaccaccggcaagacacgcatgattcccaccggggagcttacggaacccttcgtcatccggcccacttcggaaaccgtcatcggtgcggctttcgcccgctggacctccagctaccgcgatctgcccctcaaggtcaatcagtggtgcaatgtgatgcgctgggaaatgaggccccgaatcttcctgcgcacggccgaattcctgtggcaggaagggcatacggcccatgaaacccgggaggaagccattgaggaaaccctcaccatgcacaaggtttatgaggaattccagcgggacgtgctcgccatccccaccattcccggggaaaagacggaggcggaacgcttccccggcgcggagcagacctacacggtggaagccatggttcaggaccgcaaggccatccaggccgggacctcccacttcctggggcagaacttctccaaatcccaaaacatctgcttcgccggacgggacaacacccagcaattcgcatggacaagctcctggggcgtttccacccgcatgatcggagcgctcatcatgatgcactccgacgacgacggactcgtctgcccgccccgcgtcgctccccagcaaatcgttattattcccgtcacgcccaaggaagaaagccgccaggccgttctggaccactgcgaggagctggcgcgcaccctccgcgccaaaaccttccacggccagccgctgcgcgtgctggtggacaaacgcgatctgggcggcggcgccaagaaatgggaatgggtgaaaaaaggcgtgcccgtgcgcctggaaataggcccccgggacctggaaaaaggctccgtctgccttcagcggcgtgaccggcccgccaacgaaaaatccttcgtcccggaaacggaactgatcgataccgctgcggatatcctccaaagcatccaggacgccctgcttcagcgggccatttccttccgggactcccatatccgccctgcctccacgctgcgggaattggaagaaaacttctccggtgagggagacgcagactggctccaggtgccgtgggacgggtcgccggaagaagaagaagcactggctaagcggctgcgcatctccatccgctgcatcccgctcggcgaactgggccagggcgaaccggctccctgcatcctcaccggacgcatgacgacacgccgcgttctgtgggccagaagctactgagccctctgattgtccctttcaacgggattgttccaaggcaggcccaaacgggcctttacggaacaatcccgtttttatgcgccccccaccgttttcccaaaaacggcatcaacaaggaacggaacaacatgtatcgcagaccagaacactttcttctgctgcgtccccatgccggcggcgacatccgtattccggggaaacaggattttttctctaaaaaaatcttgccaagaccggaaaaccttatatactcctcggcacacggacgctgtaaggctccaatcatttaaagcggatgtagctcaggggtagagcgcaaccttgccaaggttgatgtcgtgggttcgaatcccatcatccgctccaacttttttatagcaaaagacccgcacaaatcttgatgatgtgcgggttttatatgatggcccgtacagaaaaacctgtccccccctattgcaaaaccgttacaggaaacattttcatctgccctggtgaagccctccggacgatcatccttcatggcagacgttaccggttttctcaggcatgtcctgccttattgtttaatgacttagtgtttatcctctgaaacctaggcggacttaatgatcaccgtatcaagaacctgtcgcgaaccctatgatcatgatgacaagccatatacccaacaatataagcgcaataagatcgtcttttctgttcggcttcacgatgatgccacacaatccccaaaacaggcttgtaaattgaccgatgaacattgccaatcctaatgttatagatagagagacaggaaagctaatgtttttgtcgaatagcgttacacaagctgtaggaaacagcgctatccatccgatgagtgaaggagtgtaagatttcatgattaatgctggcgcatgcctgaaatcattttataccgcttctttcatcagttgccgcaggaagttggccggcaacgagaacatatggctccatccatcaagaattagaaaaagatgaaccaaaaagagcgattcccgtagaaataggaaacataattccgcatttatctaatagaaaagtctccatggaaaatatattttttcgcaacaaaccctgtaaggctcttcttttgattcagggggaattttgatttgcacttcgatacggcagcctttcacgaggtctgggttgtttaacagatactcctcgacttccggaggaatccgggcattcgttccgtcttcgacaacgaaccagatctcacaagttttacctctccaggaagctccatcgcctgttaatttcattccatgccgggcaaatatcttatggagttccaaatcctttttcactgttttcaacagagttacactcctcttcataccgtttcccttatctatgcccgaccagaagagggagaacggtaaataaatgaagtaaagagcggctattcctatgacgatccacattttctttttcatcttaaataatttattaattccctttttgtttatttgcaaggcactcttccttcgccatagcctctatgcccttgaggagctggagccagaagagaagtatcgggggcaaacggggctacaaaaccagctctttccacgatttcacacgcccatccgcagcaatttcttgctcccgagttgtatagtgaatatagagggacattcttttcatcttcccggatctgctcttcaactttacttactgactcaggacaggctttataagtgtaggaatttctaggatcggcagctccttcattatgggcatcatcctgaatttctccggctccaacgcctaaagcgcctttgtgccaacttccggggtagagacctctctgcatattgggcgttttgacccaagcatgtcctacatttcctagcaaattcctgaatggtttaaccagaataaaaatttcctgtatttcatattcgcaacattcccttcctgcgtcatccgcaattttagagtattttacaccatccttgcaacattccgtttcagcatcttcagaaagtccaagcgtatcagagtacaggcatgtattgttcttgacaaagatataaagattccatccgctctgttcatcgacaggatctctgctgatccaccttccatcttggggattatagtagcggtaattgtaataaaccaaccccagctcgtcatcagcatactcgctggagaagcggaagggattgatttctgccgcattgccttccatcttgagaacattcccatacgggccgtattcgtacaaggctcgccggcccgccttgatgccgaagagcgccgttgtgttcttcaacgcgtcatgcgtataataaagatcttccacataagttcccgtttcatcaaagacgctcatcgccaggacgcgcgtggctaccggttccaggggatcccacaggtacgttttacgcaggacgggttcagcggattccgaagcgtccgcagcatccagttccgcgatttgcaggtaaccctggtagataaaccgtttccttgacatgagcgcttccccttcatagacggatttttctaccctcctgttcagataatcgtaaacgcactcaatacgcctgtccccctgcgtgaagctgaccgcctgattcaacgcgttgtaggcggcttcccattctcccgtggacgtctgaattttcgtctggttgccgtcggcgtcataggtgggaacaaagggcggctccgtaccctcggtgatatccgtgtattgattgagccggttggcaacgtatgtggcgggaagggaatccgttccctcccgtgaggttgtgcggttgccgatgttatcgtaggcgtaactgtatatgccgccccggctcatcgcgtcgctcacaagttcattcctgtcattgtaggcgtaggcgtgggtgaggtcgggcgcggacgtgttgaaatagtctttcttcgtgacgggacgccccagcacatcgtaagagtagtcggttttggccgggtagttggcgctgccggggcgcaggtagtcaatattcaccgggaggtcgcgcttttcttccagggtgcgccgccatttcaacgtgttggggtaatcaagagtgtccagcaggccgctttccgcattgtagccgtaggtgaagggcttcgcgacggcgttcagcgagacggtggaaagccttccggaggcgtcatgcccccatgccgtccgcaaggcggcagcgcccgcatagtccagacagtagcccgcgggcctccccactccgtcacggcggagggtcaagacgcttgccgcaaggccagccgtcgtttccatttcctgttcgttatactgattgtacgtgaacgtgcgcgttccggaagcgtcttcaatttgcgtcagctgccccagatgattgtagcggctgctgatggagggggtaaaaccgtcgtcattaaaggtaatggaggtaagctccccggtaaggggggcgtaggagcgggaggcaacggttccccgcgcgtccgtcgtagcggaaacgcggttgagcgcatcataagcggtatccacatgggtggcattggcataggtcttgcggacaaccagccccgtagcgacatcgtacgtccaggaggtgatgtccccatccgtccggaggcggggatcagtagtgatgacatccccgggatcacggaaggtggaaaggctcactatatggccggcggcgtcataagcgtatacggcgggctgtatggccgtcccccattcggcttccttgcggccccggatatcataaacggaacaggccgttttaccaagggcattggtaacgcaggtaggcagatcaaagggctgggcataagcgtaggtggtcgtgttgcccgcggcatccgtgccggaaatgatgcggccggtgatgtcgcagacggcggtaaagacgttaccgcgcacatctgtgtccgcataggtgatgcccgtttccgtataagtgcgctgccgacgggcggtcgcgccgtcaaagcccgtaaccgccgtcgtgaatccgtccacgacgcgcgtgagggcaacgctcccgacgccgggcacggttttcttctgcaggcggacagaaccgccgccatactccgtccactccacggtatcctggccgcggggatccgtcatgacggttttgcctgcaagaacagaactcagagcagagagcagggccgcctgcttttgaagaacgggagtacctgaagaagtataacttgttatggaaacaagtctgtagatgccgtcttcacggctctcggccacataagcgtagtcagtaatgcgggagttcaggatggtcggttcatcctccagggcgacgattgcccttgtcctgttcccaaaggcatcataggcatagagtgtcggcgccatgtccgccagctgttccctgataaggcgccccttgtcatcgtatgcaagagtgcgcacgttttccccattcagggtattggcggcagcaatccgtacaagctcgccaaagccgttgacggtggagcttcccgtcacgacgcggggctctcccccctccccgcccggcacagcctccgtcgtgcggatcccttccgccgtggcctcaacggtataaaggatatcctgctgcccggtgccgtaacgccgcactactgttccggaagggcttttccgggtgatgagcgtagcgccggcgggcgtggtaactgtttctaccaggccatccccgctgtaagagcggacggtggtgcgccccagaatatcggtttctcttatcaggcgccccagcaaatcgtattcccggctttccaccgtcgtcattgggcctgcatccctgcgcagggaggtaattttaccgagagcatcacgggtatagctcgtgatggtttccggagtgatcatggtttccccgtccgtaacggctgaacggatggtttccaccagctggcgggccgtattgtaggaataggaagtggtcactccattttcatccctttcccacaacgggccgcagcaggtcatcatgcgctcgtaaacgcgcccattggcgcgggtgcgctttacccaacggttctcaacgtcatattcataagaagacgcgtccgtcatggaccaggcgccatcggccagccgggcgtattgctcataacgcatgttattgccctggccggagacgtaagtaaccttccgcgagctcaggccggggacgctctctcccgctatccgcgtttccgcggtcactttgtaaagggctccgtactggtccgtctcttcataaaaataatgcgtctgaatgccgtccatgccctgtttcatcttcaggcgtccgcgggcataaacattgggagccgtgccgagccaggattccttcacttccagacgcacgttttcttcccccaatgcggtcgtgcgtttttccacgcgccgcacatgattttcctcaacgtaggtgtaatccgcgcgccaaagttccgccgcagtggccgtcaacgtcacccattgggtgaggatatccggatccgcctgcgtctggtcccgatacgtggtgtaagtgaccttatcgccggcttccgcccaggggacgctggacacgatttcacggccgaaacggtcgtatgcccacgttttgacacttccgtcaggagcagtttccttcgcgatttttcccatgccggtgtactcgtaagtcgtttcccgggcgtagtccgttccgtagccttcaatacggctggtgcacaaattgccattgcgggtgacggcataagtctcacagacgcgggagatgggagcgccgttttccccccgctggatggtggtgatgagtttccacgtgccgggcgaaacgatctgtttttctttcagagtgaatatggcgtcttctccttccccctgcgccatgttccatgctccgtcggctccctgccagtagcgggtggtgtagggcgcgcgcccggcggtctgttcggtaacggagagtctgcccgcagccgcgtccccggtaattgtgaaggttttaaaggggtcgcccgtgacggaataaaggccggtggaactgtttttcccgcccacctgctcggggagatagagggcgatgcggtaaccggactccgtgacattttcgatgttggcgagcccgtcccacaggttccatatctgccggatgcttccatccgaagcccgcacgatatccagctttccgtcaaattcttctcttgtgtaagccgcgccgtttttagcggtgtagccggtggcgtatttcaaggaagaggccgaacctgcggtatagttaacggtattgcccgcgtttgaacggatactgaggcagaattctcccgcccttgccggagaagcggatctcctcccgaaccacgccgagcccccgcgcttggcggatcctgcaatgggggccacgctgtcacccctgctgccgtctccatccgcgtaacagtagtagttaatggcagttcctccgctcctgatttggaaagcggtattcgccccgatgcccgatgatggcgcggagatgatttcacgagtcatcggatgccagtaatgaagcgcacgtggggaccagagctcagccgagaatgtgtatcctactatttccagcaatccctgaggcagacccgtcatgccccggaaagagccgaaattggtacgccagatcatttccgtcttgagcgtccgggcaaccacgcgcctgccggcggccgacgaaccgtaaagggtggaggaagagcgcgcgccgcgcgccgaagagctgctgctgccgccctcattgttttcacaggtgcagggatcctcatcttcaccgttatccccttctccgttgtcttcctccggacagggagaactggaactgctctgggagccattgccgccagcagcctcctccccgcattcacacggcacgtcttccccctcatcttccgtacttacgggttccggataaccttcatccggctgataggaggatgaggaggttccatccgaaaccatgacttcaatggaataattaaggatggcgagattagtccattcaggaggaacagccacgttctcataagtcatgtgcacgcggtgcggtcccggttcaatggggaagctcaagcttttttccctataagaccctccatggtatttgccctccccaggaatgaaaattccctcgccgtcaacagtaagagagccgttatcatccacccccagcatcagacggcactccgccgtttcccccgggccgagcggatcaacgacaatcccccagtcccagctgccgctgaacgccccggcctctttgttaaacgggaccggcacacctccggacgctgtgagggaattatcaggcagagaattcgcatgacgctgaacctgttgatctttcataaaatccagataattgacgattgagggacgaacatcaaagaagacaacgcttctctatattcactattcttatgtatctcggaaaacggaacagatcaatgattcatttttgaataattgttactaattacaataaattattaccaatcaatattcttttaaaatatatatttattcccaacaaccggagggaataaccatgtttttccgcgctgcctgacatcccccgcatctactgccggccaaatggccatggggacgggctgaacaacttccccggcctccgttaagacaaactccggcagatctatctgcatcatcccttcaacgaaaggttctcccgtctggtcgtccagataaggccggtgtcggcactttctttacgccgtcccaattctcaacccggaataaaccaatgaataatacgactcaaccaggggctgctccaacaggccccgcaacaaccaataacgctccggcggtaaaatccgtcctccgcatgggagtattcactctcgccatgatcaacgtttccgccattgtcagcctgcgcggcatgcctgcggaaagcacttacggactgagttccgttttttattacattttcgccgcggtattctttctggtgcctgtttccctggtcgccgcggagcttactactggatggccccaaaagggcggcgtttaccgctgggtaggcgaggcattcgggaaaaaatgggggttcctggccatctggctgcaatggattgagagtaccatctggttccctaccgttctgacattcgccgccgtttccctggctttcatggggcccggacaaagatgggatgaagcgcttgccgccaataaatggtatgttctcatcgtggtgctgtgcgtgtactgggcggccaccctgcttaatctgcgcggcatgaagacttccgcaggcgtcaccaaatggggaaccatcatcggaaccattattcccggagccatcctgatcctgctgggtctgggctattgggccggcggcaacccgatcctgctggatatgagctgggacaagctggtgccggacatgagcaatttcaacaacctcgttctggcagccagcatcttcctgttttacgcagggatggaaatgtccgccgtgcatgtgaaggatgtgaataatcccggacgcaattatccgctggccattctgatttccgccatcattacggtgcttattttcgttctgggcacgctggccatcggcttcatcattcccaattcccagattaatctggtgcagagcctgctgattacttatgacagctatttcagcttcttcggcctcggctggatgaactggattctggcgcttgcgctggccataggcgttctggcccaggtaaccgcatgggtgggaggcccctcaaaaggcctgtaccaggtgggcctggccggtaaccttccgcctgtcatgcagaagcggaacaagaacaacgtccagatgggcatcctttttatccaggggggaatcgtcaccctgctttccatcatgtttgtaattatgccttccgtgcaatccgcctaccagattatttcccagctgaccatcattctgtacctcatcatgtacatgctgatgttcgcgtcaggcatttacctgcgctaccgggaaccgaatacgccccgtactttccgcattcccggcggcagaaccttcggcatgtggattgtcggagggctcggcttcctggccagcctggcggctttcctggtgagcttcatcccgcctaaccaaattaccgtaggcagcagtaccatgtacattctccttctggtggtgggcaccttcattttcgcgggtattccctttatcatccatgccatggccaaaccctcctggaaacggccggtggatcccgaagacgcctttgaacccttcggatgggagaaaaacaatgattcccattccgcagcaacccctagccattccatatcccatgagtaacattccttccaatgaacaaatccggacggccctggataacgcatacgcctacgccaaaaccgtccagggaggcaaaaacgcctcgtacattcccgccctggcccaggtgccttccgacctgctggctattgccgtggtcaccgtcaacggagacctgctgactgcaggttccgcggacgcaccctttgccattgaatccatttccaaggcattcaacctggcttatgtcatggatctgatcggcatgaagcagctgcgcgcgaaaatcggagcggaccccaccggggaacccttcaattccgtaatggccattgagctgcacggcggcaagcccctcaatcccctggtcaacgcaggggccatggcgacggtcagcctggtcaacggttcggattccgatgaaatatggggaaacatgatccataatttcaataacttcgccaacacggccctgactgtgaaccaggagatttacaagtcggaaagcgctaccaaccagcacaaccgcggcattgcctggctgctggacagctacggctatttttacaatacgccgcccatgattgtggatttgtacacacgcatgtgttccctgaatatcaccgcttcccagctggccctgatgggcgcctgctacgccaacggcggagtcaatcccgtcagcaagaagcgtgtggtgaaagaggagaacgttccccccattttggcggaaatgtgcatgtcaggcctttatgattccacaggggactggatgtacaaagccggccttccggccaagtccggcgtgggaggcggcctggtagccgtagctcccggcaagctggccatggcggctttttcgcctcccctggatcccgcagggaataccgtcaaggggcaggcggcgcttcaatccatcatcagggaactgaatctaaaccttttccggagctgatccgggatgagaaggtaaacccgcggagccaaaatccgaaaggattcccgcgggtttactgtatcctgtccagctcccccgaggcagaccgcagtttctcgactacggatttcagccataaaaaacagccttccgacacagtacgctgaaaaacggatatatccggcggacaacggccacatcacctgcgccccggcagccgcaggcaatctttccccggcgccccgcatcagctcctgtttgaaaagttgcacagctgcatggctacgccgtcttccataacccggaagccgtgcttctcataaaaagcggcgtttctgctctcctccggcatgatttcaagatacaggtagtccctgtatttttccttaaccatttccaccatttttccagcaatccccctgccctgataggcgggatgcaccagaacataatgcatgtaggcaaccatctcgctgtcgtccagcacccgcaccagccctgccaggcggtcaccatcccaggccgtaacaacagtggacgaattcatgagagccttgaacagacgccccggatattgtccggaaatccagccaacggacaggaacaattcttgaacatcttccctggaaaatttcttctcttccgtaaaaacaatcattttttctttaattaattattgattatccgcctgtaccgtcgcggccacacaaccgactgagcgggaaacgcctttccctcggccggattgacaccctgtttcaaggttttatctgctcccactgccgcagtcaacaccgtcttgtccgagggttttacccattccaaggacatggcggagcctgtgataagaacgcgcgccggaaacaggcaaccctttccacagtcagcagctcgtccgcccctgcctcctcagcttccgggggaaggaagagccgcaccaggaacacacatcttcttttcagggaaacgatactcgaatacgggagacggcatttttcctggaaccgattccccaaaaacggaaaactccgggcccaggttcataacattgtgaaaaacctttctccgtcatttgtttaaggacttgtcaccacgcttcttttccctagaatccccccggtatgcttgacgccctccaaaatgcctttttccagaccggggacacgctcacatcctggctgtccgctttcagcagctttctgtgggggtggcccctgctcatcatgctgctgggcacgcacctgtacctcaccgccatcctgcggtttccgcagcgttatctgcttaaggccctgaaattgtattttgtgaaagatcatacggacaagggagatatctccccgttcagctccctgatggtggccctggcagccaacatcggcgccgggaatatcatcggcgtgggcgtggcgattgcagccggaggccccggcgccgtcttttggtgctggctgacgggagttctgggaatggcaacccgttattcggaaggattgctcgccatcaaataccgggtggaaaacaaggacggcaatatgagcggaggccccatgttcgtgctggaacgcggtctgaacagcaaatggctggggacagccttcgccgtcttcacggccattgccgccttcggaatcggcaatctgacgcaagggaacgcggcggcggaacagctccaccacgccttttccattccctcctggggaacagccgccgttctgacggcattgacggctctggtgatgctgggaggcatccagggcattgccagggtatgcgctttcttcgtgccgttcatggccgtcatctatatcatgggatgcctgtatatcctgaccgtacaggcagagtacattattcccgccatccggtatattctggactgcgccttcacgggagaagccgccgccgggggcgcagcaggagcggccgtcatggcggcaatgagaaccggtgtggcccggggcctcttttccaatgaggccggcctgggatccgcagccatcgcctccgccgcagcacagaaccgcaaccccgtcaggcaggcgctcatctcttccagcggccccttctgggataccgtcatcatctgcgccctgacgggaattgtgctgaccaccagcatcatcgcgcatccggacatttcctgcacggacggccccaggcttactacgctggcattcagcaaaattccttacataggctcccctctgctcacgctcagcctggttacgtttgtagtttccaccattctgggctggtcctacttcggagaaaaagcgctggaatacctgggaggcatccggctgatcatgccttaccgcgtcatctgggtggcggcggtcttcatcggctgcgtctctaaaatagaactggtatggatttttgcagactgcgccaacggcctgatggccctgcccaacctcatttccctgctggcactttccggcgtgcttgtccagcaaacgcggtactacctctggcagcacaggctggacgattacgacgaatcccacataccggaaggaaaataacgatttttttaactcggattcaaataattcttgcctttcggcttccggtagtatttacttcgccgcgcagtccctgcaaacctaaaagtcgcgttcgtctagcggtccaggactcccgcctttcacgcgggcaacacgggttcgagtcccgtacgcgatgccagctttaccgccgcggcagttacgacaattccgcttttccccttttcagggaagcatattggaaaaacgtaatggccgcggttttcttttggcccggttttccggattcaggaaagcgcggcagaggcgccggaagcggaatcccccccctgcttttaaatgccggaacatgtcttacatcccccggatttggctttcagaaaaccccgccatcttttaaaatcctttacacgcaaacgccatggattacacacctctcattgaaaaacgccgccagcgcctggaagaattggaaacagtcattgccgaaccggacttcttcaatgaccagaaaaaggcctcggaaatcatgagagagcaccgccgcctgaaggaactcatggaaacatgggattccctgaacgccacggaacaacagctggcggacaaccaggaactggccaagacggacgatccggaactggcggaactggccgccctggagattccagaactggaagccgccctggaaaaactgcgaagcgacgtgcagtacagcctgctgccccgcgacacgacggaagaccgggacgccatcattgaaatccgcgccggaacgggcggggatgaagcctccctgtttgccggagacctgctgcggatgtaccagcgttttgcggaagaacgcggctggtgcttcgagcatctggaaagcagcccgtcggacgtgggcggattcaaggaagtcgtctgccgcattgccggggaagaagtgttccgcttcctgaaatatgaaggcggcgtgcaccgtgtgcagcgcgttcccgctacggaaacgcaggggcgcatccatacttccaccgccaccgtggccgtcatgccggaagcggaggaagtggacatagaaatccgcccggaagatctccgcatcgaagtatgccgttccggcggagccggaggccagcatgtgaacaaaacagaatccgccgttcagatatggcacatacccacgggcgtttatgtccggtgcgaggaagaacgcagccagatgaaaaaccgagaaaaaggcatgaaaatcctgcgcgccaagctctttgaagccaaaaaacgggaagaggcggaaaaatactccgccgcgcgccgcaatctcatcggctccggcggccgtgaagaaaagatacgcacatacaacttcccgcagaaccgtctgacagaccaccgcatcggctacacttcccacaatctggacggtatcctgatggggcagctggaagacctgattatggccctccagcatgcggaaatgcaggaacgcctggcggaggccggaatgtcctaacttcctttttcctttcatgaaaactttactggaagtccttcaagccggcacggattatctggcccgccaggggtgcgacgaagcacgcgccaccatgcagcatttgctggcccatgtcctgcactgcaaccgcacggctctttactcccagtttgacaggcccgtggaagaagcggagctggcacccctgcgcgaactgctgaaacgcagggcagcgggagaaccgctgcaacatctgctgggggtcacggaatttttccggagggatttcctgacggatgcccgcgccctgattccccgcccggaaaccgaggaactggtggaaatggtgttaaagaaaatcccggaccatccggtacgcatcctggacatgggcacgggctccggcgttatcggcgtcacgctggcgctggaactcaaggagcgcgccggagaagtcgtgctggcggacatttccccgcaggctctggatctggccctggaaaatgccatgcggctgggagccagagtctccaccatccagacgaatctgttcgccaacattccccaggaaaaaacggatccgcatgcggaggatgccgattctgctccggatggaggaaaaggggaaaacgggcggaacatgctctttgacgttatcgtggccaatctgccatacattgcagagggggaaaaacttgccccggaagtcatgaaagacccccatacagccctgttcggaggtcctaaaggctgggaaatcattgaacgctttctggcccgcgcccgggattacctgaatgaagacggctttgtagccctggaaatcgggtacgaccaggcatccgtcgtaacgcaaatcatggatggatacggctacaattacattgaagttctgaaggacatgagcggcgtctcccgtttccccttcggctatcgttaatgttatcctccttttcactccatgcaggcggcgcgcattctggttgacggacaaagcgatctggtactggattacggtattcctccggaagcgggagacgtcaagccgggctgccgcgtacaggtgcccctgcgcaacagaacggctaccggaaccgtgcttacgctgtcagaaccggccccggcctggaaggacaggctcaagcccattctgaaactgatcgatccggagcccctgatttccccggtgatgatgaatctggcctcatgggcggcggactattactccgtggctctggatcagatgatccggtgtctgctcccggaaaccgttcgtcaggaaaatacggcggaaaaaatgcgcaaaatggtgtatctggaaaaaactccggcacaggaggaactggacgccctgtaccgcaaagcaccccggcaggcccaaatgctggattatttctcatccgcgaaacaacagtccgcccccctggcggcattcggcgccggagccctgaacgttgcccgcagcctggaagccaaaggcttcatctccctgaaagaagaggccgtgcaccgggaccccagcaccggggagcaattcgtccccacccagcccatgaagctgaacagccagcagcagaaagcgctggaagaaatcacggccatgtgcgcggcagagcgcaaaaaaccggtcctgctgcaaggggttaccggttccggcaagacggaggtttacttacaggccgtttcccaaatagtaaaatccggaaaatccgccctgatcatggtgccggaaatttccctgacgccccagacggttcagcgtttcaaatcccgtttcgcggaactgccttcctccgtggcagtgctgcacagcctcctttcggacggagagcgctttgacgaatggcatgccatccgttccggaaaggcacgtatcgtcatcggcccccgttccgccgtcttcgcccccctccaaaatctgggtctggtgattgtggatgaagaacacgacgcctcttacaaacaggaaagttccccccgctaccacgggagggatctggccgtgctgcgcgcccatctggaaaactgcgccgtgcttcttggctccgccactccctctctggaaagcatccataatgccctgattgggaagtattccctggtaaaactgacggaaagggcggacggtcagaagctgccgctcattcgcatcctggacatgaaaacggaaggaaagaataaatccggtcccaacgttatctccgaacgcctcaggatgtccattgaccggcgcctggacaaaggggaacaggttatcctgctgctcaacaggcgcggattcgcacgctccatccaatgcccggactgcggccacgttgtcacgtgcctgcactgctccctgcccctgacctaccaccgtacggaagaccgcctcatgtgtcacctgtgcggattcaaagcccttccgccccgttcctgcccggaatgccggtccgccaatatcctgctccaggggtacggaacccagaaggtggaagaaatcctgcgccgcacttttcctgcggcgcgcatcacgcgcgtggatgcggacgtagcccggcggaaaaacgccgtccggaccattctgaaccagttccgcgcccataagatagatattctcctgggcacccagatgatcgccaaagggctggactttcccaacgtgacgctggtaggcgtactgaacgcggacctggggctccacatcccggatccccgtgcaggggaacgcactttccagctcctgacgcaggtagcgggccgcgccggccgcggcgatctttccggagaagtcattatccagacttttacgccccagtccccctccctgcaatacgcccggcaccatgacacggacggctttgcagcccaggaactggaaatgcggcgtactttcgacctcccccccttcacccatatcgccgtcttgaccatacgttcccagcatgaaagcatggcggaattcgccacgcaaaccctcgcggcccgcctgcgcggcatgctcccccctcccgccacgatgaccgaccccatgcctgcccccatcccccgtgcgcacggacagttcagattccagattacggtcaaggggccatccgcccgcatcctctcccgcactctccggaaactggtgcaggaagccggcctgggggaagacctgacggctgtcattgatgtggatgccatgtcattcatgtaagccgccttgccaaaaccggccgggaacattagactttcggcacaacacaacttactattatgctgcttcatttctacaagatgacgggtgccggcaacgactttgtcatggtggacaatcgtgacctgagcctctcctccgtgctggacagagaaaccatagaagccctgtgtgaccgccgcttcggcattggggctgacgggttgatcgccgtggaaccttcccagggcaaggggggaattgttcgtatgcgttattacaatgcggacggcggagaagcggaaatgtgcggcaatggcgcccgctgcttcggcaactttgccgccgccctgcttcatcacgacaagacagccccccttccttttgaaaccatggccggcgtcgtcaccgcaacctttgaaaaagacggcaacgtcaccgtaaacctgaccaatccccactccatgcagctcttcgtgctgaatgccgatccgactgtgggggcggatgtccatttcctgaacacgggcgttccccatgccgttgcgtttctggacaagctggaggacctgaacatttccaggctgggagcctatctgcgttaccatgaggccttttcacccaaaggcaccaatgccaacttcgccagaatcctgtctccggggcacattgccatacgtacttacgaacgcggcgtagaggatgaaacgcttgcctgcggaacgggaatgaccgcctgtgcgctgctgcatgccgtattggcggacgccccctcccccattcaggtggacgtggcgggcggagacacgcttaaagtcggattccaacgcacaggggaccgttttactgacgtcacgctgaccggaccggcagaccttgtgttcaccggagacattcagatctaaacagcttcgacctgaaaaggcggactccttcccatcagggaaattatctgttcagcagggaacattccgcccgcacataaccgccgtaattattgcagaacgccttgtacacggcagggcccatattcgtttcgcaatagtactttacggtaatacagccgttttcgcgttccatattaagaaaacggctggacagcagtaccagattgctctggtaattccacaaagccatgtcacgctccatttcctcatgaatcctgtcgcatataaagctctccggaggaggaaacagaatggcgctgacaacaccgatcagacagattcccggaatgacccctacggcaagaaccccgtgacatttcctgaccaggggaaggtgattcctgaatttccggaaaatggtgaaacggaataaataacccgccagcagcgccaccgggaagaacacattcacgtactcaaaagccaggctcattcctccaagaacgaaaaaaccgatgcccttccacaccttccggtaaacaggaatgcaggcgcaaagaaacacgtacagaagatatcccagcaggcaaaggaaaggcagaagcgttcccgtaaaaatatgctccaccatgcagtcccacggatattccctgctgggagcgaaggcttcatggaaaaacatgcataccatgctcaaaagcaccagcgcggcaaggaggatggtctttactttttttgactcatacaaaagccacagcaaaataactccgaacggcaataaatagcaacctatactgttgaatacagtggacaacatgggaatatgaggaaagaaattcatggagcggatatggataaatgagcggttaacaactaaaatgcagcagcggcttcaacaacagtaattggaaataaaataaattcaaacactcgttttcaaataacccataaaaaatcatattcttttcacgaaaagccgttcagccgggctctcccacttgacaaaacaaccctctgaaaaggatagtaacgctcttgtgaaacactcccttttcatccaggccgtcctccttccggttctcttctgccttccccaatgcagccgcaaaccgctccttccggaatatacgcctctgtgttccggaatggtgccgggggaacacactgcccaccgggccctccgggcacgggaaaacagaacctaccgggtcggtccgaaaggcggcgtatattacatcaattcccataataaaaaagtttacatcaaatccaggagggtgcaatagaagaccacacggtttctccgtaattttccaaatgggaaacaaataaccgtcctatcatgtttttattgtataattgagaaagtattccgttcaaaaaactcattaaactcattttcttcttgccaaaatggaagaggacgggtaatgtctgccgcaccacaacactaaatggtgtcggtagttcaatggtagagccccagattgtgattctggttgttgcgggttcgagccccgtccgacaccccatcccctttccttcataaaaagagcacttatagtgctcttttttactatccccaaccctttccgcatgcgtaatccagaattcgtcaaagccgctttttccgctattgccccgcgctatgtggctaccaaccatgtgctgagcatgggtgtggacctgctatggcgccagcgcgtcgttcagcttgtctccgaatggaaaccggaaaaccttctggatctggcgactggaacgggagacctggccctggccatcctgaacgcgatgccggaaatccgcctcaccgggtccgacttctgccagcccatgctggacatagcggccaggcggggactggatcatctggtttgcgcagacgccatgaacctgcccttcccctccgcctcctatgatgcggtcactgtcgcctttggcctgaggaacatggccagctatccggacgccctgcgggaaatgggccgtatgctgcgcccggggggccatctgctcattctggatttttccctgcctgaaagcctgttgaaaagcccttaccggttttatctgcaccgcatccttcccgtcatcgcagggtggatgaccggccaccgggaagcatacgactacctggcggacagcattgaagccttcccctgcgggcaggccatgaaggctctgctgcgggaatgcggctacagcaatatcacggcggaagctctgaacgggggaattgccagcatttacacagcccagcgatgagtgcgggggacgcaagagaaggcatcatacgcggcaaggcggtacgcgcccgcctgggcggaaaacttgccggactatccctgccccggcaaatcgccgttattgctttctggccattcctggaacagctgctgagctttttcgtcacctcgtccgaccttttcatcgccactaaaataggggtggacgcccaggacaccatcaacatctctgacggcatgggcgccgtcgtcttcatcatgtggttcggcttcgtcatccaggggtctatcatgatgggagccacagccatcgtttcccgcatgacgggcgccagggactatccccaggcccagcatggcctgcaccaggccgccatgctggggctcctggcaggaaccatctcctgcggacttctcttcacatgcagcgatttcctggtcacgcacgtactgaccatgaatgaaaccgcccgggcctacgccctgcaatacgtttatatggccgcatttgcggccccgttcagcggcgtggtctttgccatcaatgccgccctgcgaggctccggagacacgcggcttcccttctggatcatgatgagcgtaggcatcctcaatgtcatcttcagcgtcattttcgtctttgcggacgctcctctgggcggctggcgcatcggaggaattgcggcaggaacggtctgcggctacggcatcagcatgtgcatcctgctgttcatcatgctgcggcgcagaaaaaaaatcttcacgggcaggaaaaatgaatccctggaagaacttgtccgggaacggggagaacactatgccccgcccctgtacctcagcttttcccatctacggccggacatgggcatgcagaagcgcatcctgaaaatcgggctgccgcaggccgtggaagtcttcggcatgtggggcatccagatgttctgcctttccatcatcagcgaactgcctgttaaaggcgtgctgggcgtccacaatattgccgtccgcattgaatcgctcagtttcctgcccggcttcgccatcggcatagccgcttccacgctcgtggggcaatacctgggagcccggaacgcgcttatggcccgcatcaccatctggaaatgcatgcggtacgccgtcatcttcatgacaggcctgggagtgctcttcagtgcctttcccgccctgttcatggagatattttccaacggcagcacgacccttattgataccggaatccccgtgctgcgcaccatgctggtggtggaaccattcttcgccgcctgcatcgtgatgaaaatgtccctgcgcggcgcgggagacacccggagagtcatgcttatttcctacggcattatgggctttttccgggtcgtctgcacctggatatggttcaggctggcaccggaaaccatgactttgtggggcatctggctggttttcgcctttgaaatggccgtccaatccgccatcctctataaaatcgtcaaggggcggagctggacgaagctgcaagtctgaacctttctccggcctctcccgcctcccggcccattcgcaaatccaaaacgtttactgcaggataaaaactttgctttcctcctccaattctgctagcatcctttcacgttgttctgcaacgggctcgtagctcagcggttagagcaggggactcataatcccttggtcgtaggttcgaaccctaccgggcctaccaaaataaagccttacaagttaaccacttgtgaggcttttctttctcttcccgcttctctcaaaaattattaaaaacgcgtaaaaacgtaccaaaacgcaagaaaagttgcaccactttagcatcaccatttttgctacagtagcagaaaccgcatgagaagaggagtcattgccggaattacaaatagctggcagaagaactgaaaagcaggaagacttctcgtaattccctgtagattccttagatcattaggtcatacaacacacctatgcagagagtatgtaaactgtaaaaaacacccgatagcgacgaagttctttattctcacgattcatcggaaaaagttcttggagttgcagatgagaggatggatttaagacgccaaaaaccgaaaataattctataaatcgcacagctttaagggttacagcaaattcagaaacacaaactactgaatcgtcaaatattctttcttcgagaaagaaaaacattgattacaggaattggactgatgcccggaagggatggcctcctgtcaagggctcagcatgagaggaaaacattttctaacaaacagacaacattgatgtctattaagggaatgcactgaacgtaagaattataatattatcttttcgtgtaaaataatgaccatcttttataaaaaatcaaaaacatacaaataaaattctatcgacaccgacttcagatcatactattgataaaacgatcaggaaagggcggcccccctcgcttccttcattacccccgactcttgaatacctgatgaatccgcctcatcgttcctcctccgtccatcgttctgccgttcccggctaccggaaatggtactttggagccggcggcagcctcggcaggcggggcatggaggcagctccggagcccgacccgctgccatttgaagaaatccacgaacacgctgaaatcactgtgggaccgccgagcacgtcggcggacgggtacagtgcgcacgggacattcaccatcccggaaggagcggagggcaaaaaactctacggcacctgctcgctcttccttggggtggacgactggggaagcctggaggtaaaggactccggcggcaacgtggtggcgcaggtggatctgaaggaaaacccgcagacggcgggcgaacagggcgggcacaaataccacacggggaccggcggggcgcagctcccctccggcacctacagctgggaagtcagccagaccaacatcgactacaatccggcaagcggcaacacctccatctgcaactacagcatcgacgtggtgccgacggaaccggggggcaggaaagaacccgaaccgtgtccctgcgagggagacacgtgcgacaacagcggcggaacgccgccctccccgccgcagtcccggtcgggccctgaggcgggcatggaaagcggcgccctgggaaactacagctcggcggggtgcagcgtgacggcggaaagcacggccacgctgatgtactggtcctgcaacttcggagcgttccgtggacttgggggccttccggccggaagggtggaactgaggggtgaacaaaacgtctccggcctggaaagaccctcctcactggcctacaaccatcccctgaacagccgtctggacgtgccggaagggggcattgtccccggagcacggtttaatctggtgcagggagaccgggtaattgccatgcgctgctacacggacgggtccgtgctgcccatcggggtggacacgtcgggcggagggcgtgcggcgctggccacggtggaaggacaatcctgcctgcgctgggtggtggaagacggcagccaatacctcttctcggcggaaacgggaacgctcctctcctacaccacggcggacaggcaggtcatctccaacgcgtcatcctatctggacgtcaggcatgccggagacggctcgctgaggcaaatctggaacctgtgggacggcctgctcaacgtggaaaacgtcatctccacgggctacgtcatcgcgctctatacccctgggcaaatcaccggaacggacgaacagggattttataccgttacgggcgctcccttgaaaacatttattctttccctggatgctgaggaaaagttcaccatcacggaacaggcgcctgccaggcagccctacgccgtcacctggtggaacgacggcctggcgtggaacatgcggcagggcacgggggaagacgccctcacgaccctccgcacgcgcacggagctggaaccggaaaactcggtctggcagctggtcacggaaatctccaaaaacggaatcgtggcggcgcgcacctgcgccatctaccagaccacggacgtgggcgacctgctgctcacgctggcggaaggctacggaagcccggaggagcaaaccacgcaatacgcctacgaccagtgcggacggctcagaacggaaacggccccggacggcagccagactcatgacgcctatgacctctacggccgcctgctcagccgggacgaaccgtgggcggaaagcggcaggcgcatcacgcgctacacctatgcctgttcgggagaagccgacttcagcaacgaacccgccacggaaacggcagacctgcttccgctggaaggacacgtcaaaacgctgacatccaccacctggaaatacacgacggccaaccacatcaaaagaacggaacggcgggtcacgggcctgggtgtggcgggcacgcgcctgacggcggaggaacaatggctggccggagccgccaacatccatgcccgcggacgcacgcggttcagccgggacctcgacggcgtgcaaacgtggcacgactacgcggccacgacggagcacggcgccctctacacggaaacggtggaaacgcgcatcaacggagaagccgtgccgggacaaagcacgcgcgccgtcacctggatcacggcggaagggcagcgcgtcagggaagaaaactacctcctgctttccaccgggcaatgggcgctcacgggcagcgccgtctacgaatttgacacgcagaaccggtgggtgaagcggacggcgggcaacggccggctcacggaacgcgaactgatgtgcgacggaggcctgctgtgggaaatcgatgaaaacggcatcaggacggactacgcctacgacacggcgcgccaactggtggaagtcacgcgttccgccgtgatggacggggaaaccgtcatcacgccggaaaccatcaccacctacgcccgggatgcggcagggcgcgtgctctccacgcgccgggacacgggggcgatgaccacgcaggaaagcgccatctacgacctgctgggaagaaccgtatccgttacggatgtcctgggccgggtcaccgcctacgcctacagcggggacggcctgacggcgacgcggaccgccccctccggagccacgttcgtcacgcgcagcgcgccggacggaacggtgatggaagaatccggcacggggcagcggcacgtcatctacgccatcgacctggtcaatgacggcgtgcggaccttcacgaaagccgtgtccggggaaacgcaaaccgagctgcagcgcagcattgtcaacggagccggggaaaccctgcgcacgggcatccccaacaccgtcggcggagtcatttacacgaggcgcacctacaacgccaaggggcagctggtcaaggaacaggcggacgcgggcaacgcggccacggcgatggccccgaccctgtgggaatacgacgccttcggcaacagaacgaaagaaacctggaagttggccgatccggccaccgtgtccaactcgcgcatcaccacgtggagctacggcgcggaacaggcggaagacggcgtgtaccaggtcgtcacggcgaccaggaacaacggccggggaacgacctgcgacgaaacgcagaaaacgcttctttcttccctctcgcccacgctggaaagcaaagtcatttccatcgaccccaggggaaacgcttccgaacaatggagcgaatacggcccgggcgccgtccggacgcagaaaagcagcattcccacttccaatgtcatagcaacggccacggtcattgacgggttcaccaccacgcagacggaccatgcgggcgtcacggccacgcagacccgcgcctacacggaaaccggcgtcatctacgccaatacggacggccggggcaacacgaccacgacgaaaaccgatatcgccgggcgcaccgtttcggtgacggacgcggcgggcaacacgacttctaccgcctacggcccctggtttgaccagcctgccgtcgtcaccaacgccctgggcaacacgacctgctacggctacgacctccggggccgcaacacggcgcaatggggaacggggacccagcccctgctcttcgcctatgacgaagcggacaggatgaccagcctcaccacgttccgggaggacgccggcgacattaccacggatcctacagggcgcacggacggagacgtcaccacgtggagctacgatgacgccacgggcctgctcatccgcaaaacctgggcggacgggacgcatgaggacacaacctacaacgccctgaatctccgctccacgctgacggacgcgcggggggtggtcaccacctggggctacaacttgaagaagggggtcaacaactccgtctcctacagcgactccacgcccggcatccagtatgcctacaaccacctcaaccagctgacccaggtcacggacgcttccggtacgcgcgtgctcacgtacaccccctgcaacgaaccggacaccgacgccattaccatcgaaggagtctcctgccagctccaggaacactacgacacttacggacgctcctccggctataccctgaaacagggaaccggtgtcctccaggaagtcagccagggctatgaagccgacgggcggctggccagcgccggaatcaggcacgggggaacggagcaacgcttcgcctacggctacctggcgggaagcagcctgctctccagcctcgcgatgcccgacggcatcgtccgggaactttcttacgaacagcgacgtgatttgctcagcggcatagactgccgcctgggggaaaccgtgctggtctcccggacccagagatgcgacgctctggaacgcccggtcacccgcacccagcggcggggaacggagcctgcacacagcgacagcttcagctacaacggcagaaacgagctcaccggcgctgccctgggcgccgccccctacggctacagctacgacaacatcggcaaccgcaagacggcgcaggaaccggcccaagaactcgcctacgcggccaacgggctcaaccagtacaccggcattgaagaaagcggggaagcgccttttgtgccgacgtacgacgcctcgggcaaccagaccctcatcaagacgtcaacgggcgtgtggaccgtggtctacaacgcggccaaccgcgcggtgagcttcaccagccgggacggcgcgacagtcgtggaatgcggctacgactacctgggacgccgctacatgaagaaagtcacccaaaacggcacggtcgccagccacgaacggtacctgtaccgcggctatttacaaatagcggcattggatatgctggacaaccggaacgtgctccggacactgctgtgggaccctctggaaccggtggccacccgccccctggccctggtgcaggacgcttccctgtactgctacggcgtggacttcaacaagaatgtgtcggaggtcttcgatagagagggagctgttgcggcaatttacgactactccccctatggaacagccacccgcaccggaagactcgtccagcccgtccagtggtccgccgagatgcacgacgatgatctcgccctggtttattacaattaccgctattacaaccccagagacggcaggtggatcaaccgtgaccccatcgctgaacagggaggatggaatttgtacgggtttgttagaaattctccatatatttttaatgacttaaatggaaatgacagatacatttcgcagattttacctgaccaattatccgacatgacatttaccttgcatataggtgtagctgttgatctttgggagaagaacaaagacgggaaatggtgtaaagtaggagttaagacgtttgattatggtttgaatccagcagacagggaaacagcgaaattagccgtggagtggtcaaaaacaggaaatgaactaattcttcttttattagttggattatatatagtcaatacaatacgtggaacaattattcttggtagaggttatatagaatcttcagatggcctcaatttaactaatccagaaaccataccctcttcccctattgaagatataaatatgcttagaggaattcagcaagatataaaatcaccgcctccatataatatattaaaaaacaattgtgcagattggtcttatagagctatttggtatggaagagataaaacagtacattaatttacaaatgagaaaaatgttagaaatttttgaaaaaataataaaatttgatatattttttcaagaaaaagaattcaaaaaaagcaaatcgatattcagttatattgtttttatattcctgagtgtgggatcttatatatccatttttccagaaagattagttataaatacaaatttattatcaaatccaaagacaatattatttatactactaatttatatttcatatattacatcgtttttcaattggttttactgcatcaaaaaatcaatatcattattcatcataatctattttataccgacatatgtgatattttttatatattggtatatttatcaaaaatccatccacaatttggccacaagcatgatgtttccataataattatgatgtaaaatacgaaaacaaatcggcattatttactttagtcttgtttcgttgatctttccgattttttatcggagaaatttgctaaatatcaatatctaagatattctgaaaatcttgcgccaagactattctacataattccgaaaataattaacattaaacaaatgacatcatgaattatatgctatatttcttaattagtattatatgtataaattattctttaggaaatattcaagaaataaaaaatattcctgaagtccaagtaaaatatagcgatctaaaattttatcaaaatacatcagaaattacaatagatattacagattcagaaaagagtcgaaaaatgtttagtcttggaaaagaaatcatacttttcaaccaccaagagcaagttccatgtaatgctattggttcattttcttttctattttctgaagatggcagtataggtcgagtgaagttattttttaaaacagaattggaaaaagcattaaatggaactttaactgtattaacatcacaaaaaacagttccattaaaagaaaaaataataaaaattaaaaaagatgaagaatttaatttagatggaactttagtaaaaataacatcagtaaaaaaatcaaaagatggctacaacatttctttttcttttaaagattcaattggaattgctaaatttgaatttaaatcactagatggcgtgcaactcaaatcagaacaagaacgtttgataagttttgggttagatggaacacaagtatcttcatattatgtatttactacaaaagaaagcaaacaattagaattaattattacgccttataaatggattgaaataaaatgcctccatattcctttattcattaatctacccattttaaataaataaaagatactgttgtgggatcctctggaaccggtggccacccgccccctggccctcgtgcagggcgcttccctgtactgctacggcgtggacttcaacaagaatgtgtcggaggtcttcgacgcacagggaacgatcgcggcagcttacgattactccccctatggggccgtgaccggtggacgggcagcctcgtccagcccgtccagtggtccggcgagatgcacgacgaagaactggccctggtctattacaactaccgctattacaaccccaaagacggcagatggatcaatcgtgacccattgctgaacaggggggggttaaatttatactgctttttaatcaattatcctccatcaatagattatttgggaaaaattgcaatcgttctcgttattcctttaacaatcactgctgcggaagctacagcgtatgctgcaattgcagcagctggaatttgtttatcaaacagttactgtagcaaacttgcaacagcagcttttgttgctcctattcttgctgctgtcgctacagctaaagccatttcttctacaatatgtagtataagatgtcgatttggaaatcatggagctcatcatagttttcgagccaataggataggcataccttcatcaataagatgttggaagcgtcatttgcaatcaaattgttggatttcaggtgcatcaggatcaaatttcggaactattagaataccttatggagattgttataaaaatagaaatggcaatcctccgggaagatggtctagagttataataacgcaccctttttgatcaatgaatattaattataaatttaaaaagcattttatatatatattaagagaatacaaaagaaaaacatataatgaattattaaaacatgaatacccaataactgatctcgtaactattgaaaaagatacattaagtatagaaataattcttcttgaaaaatatagagatcatctcctattagggttagacgttactttgcttggatcgaaaaaaatatgttgtaaaaattcaattagaagaacttttactgtatataataaataggtccaatacaatttaaaaaggaaatttctgaagaaaaaaagtaataaatagcattgttcaagagccaggaactggttaataaaggtagtctgcttctgtacctccttcatattttggtctcttgcttgcagtgtgtaagaggctcttcaaaattaccctgtttaccctgtgcgatatcattcaactcacacaaattcaatgtattgaatgacacaaagtaaaaaatgcgcaccctgtcttgccctgtatcccaccacgtagcggtccattttatcaccacaaaataaactgattaagaatatttccgcactctgttctaccctgtcacggaacgggcaatggtgtacacgttcctccgtccgcctccttcttttcgtacctgcacccgctccggacacatctctgccagtttggataactttccgcccagtttagccgcgttcctggccagaagattgaattccctcattttattagcaggaagattagctcttccacggtcataaatacccgtggaagtggcgtccttcctgtagatctgtttggcatcttccggagttccgcagcgtgcggcctggtcaatcagttccagcaactgcatttccgggctgatgcccagaacagccgtggctagtgtcttgttcatgtatgctctgcatcggtgacgtcccgtaggttcctgcaaatgctccggcgcccggtaatggtcaatgaaccacgccagagcgggcaactcccttgccagggcctcatccacggcatccttttcatcttccgtcccattcggaggcgcctcatgataaccgctcagccagaaagccgcatattttatctgtatcgcatccctccatcggaaaagccgtcaggctctctccggatccgtgttgagcaactgcaccaccgcccaggacaacgccatcgggaaggcatccttccctttgccttaaatggagaccactccggcatacaggatattcttgctccggctcatgacgttccaccgctccgcctccttcacgttcttcatgatatcatccagaagaatcaccgggtaatgttccatgccgccgttaaacccttcacttcccggttttgtgaaatacttttccccggccatgaccagatgatgaaccctggtgcgggccgtgcgccttttcaggcacgcctgaatacgctgtcttgtcccctgcatccaggctataaaggaaggaaattggtcaaagtcctccgggtcatccagcaaaccacgcaagaaggccagggctgtcgagcaatccccttcctttccctctacccacggcccggacggctcggaaatcgccgtctgaaataacggggaagcccgcttcaataatatccacgcccagcgtttccagctgcatggccacctgtattttctgctccacgttcatcgccgcgccggggcactgttccccgtctctcagcgtcgtatcaaaaatatgtatttgttctttcatttacagtaaaaatgttaagaggtcgttccttcgggaactgcgcacggaaaacgttcctgttacggaatcattcctttggtgcaaatcaagaccagccgtttacttccctcgcgccggaacggctcaccggcgcatatcaagatatcttcacggacttaccgtccgagaagcagcaacagacgaccttgcagaaacagggtattcatcttgcttgtttttactataaatccaccctgaatggggaacgggacagacaatgctctttaaaacctgctctgtcaagacacctcaaatacatatgacattgttagagttgtctcatccattgaaattttgaaagagagtgccttccttcacaaaaaaactgcctgttaaacaaggttataatgtacgaataaacatagaattccaataactggaactcattcctgaaatcagttccagatgagaaaattatgtaaccccaaactggataatacgcctaataacaatctattaagattaccataggataaggtttgacacattattcacaactcaacggcctattgctattcacagcaataggccgttttctacatttcccggtgggaacgtatttcctgaatggaaatggacagggaggcgcggccgcggtacacgttgcggtcaatcgtgaaagcgatatcccagggaggattgggaagctcccgttccgctccgttgaagaaaatagcgtcacgctccacgatgccctggcgcatgaaaagcttcagatgattggttcccacgcgcttgggcggttccgtgggaaaaacgtcggaactcataaagacaggctgtggattggagttgccgaaaggttccagcttttcatagctgtccagcaaatccagcgtcaacgcctggaaggacacttccatgtctatgttgagcacggggctgcgctgttcctccgtcgtggtttcagacacataacggttgaatgcccggcggaaatcgtccatacgggattcttcaatcaccagccccgccgccatgtcatggccgccgccggaaaccagcgtatccgcgcaatggtggatggcctgcaccagggacacgccgggaatggaacggccggagcccttccccacgccgctttcgtcaaaggcgatgacgaaggtcggcttgtggtaccgcctcatcagctgggaggctacaatgcccaccacgccgggatgccacgcgcgggaacccagcacaatgacgttgtccctctccggatcaaaggagttatgaagcatttccaccgcatccgtccggatggcctcctcttcctcctgccgcttgcggttgtgggaatccagcatttgggcaagctgcacggccctcctggcatccatggtcagcaggagttccaacgcatccatgggggaatccatgcgcccggcggcattgatgcgcgggcctatcctgaaccccacgtgggcggcgttcaggaagcccgcgtggttgacggagtcggaagggcggatgcccgctatttccgtcagggttttgaggcccgtatggcggctgtgcgccagcctgcccaggccgtggcgaaccagaatcctgttttccgccaccaggggaacaatgtccgccacggttgccacggccaccaggtccagataaagtttcaggtcaaaggttttcagtttcctctccttcaggagggcatgcgccagcttgaagactacgcctgcgctgcacaggtaagtatatgggctgttttcctcaattttggcattgaccaccgccgctgcatccggacgccccaaagggcccgcctcatggtggtccagaatgatgacgtctatccccaggctgttaagcatgtccacctccttcacggaggaagtgccgcagtccaccgtaataagcagactgggagggtccgcacattcgcaaaggcagcgcttgatgccggcctcgctgagtccgtagccttcccgggaacggacgggaataaaatactggggatccaggtcataagccatcaaaatggcccggagaagcgccacggaggtgacaccgtccacatcatagtccccataaatacacacggtttccccttcatccacggcccggaaaatgcggtccacggcagccctcatttcccccatcaggaaagggtcgctcaggtgggaaagcctggggtccagaaagagttccgtttccattcccccggtgaagccgcgctgcagcaggagctgcttgaccagcaggggcagttccgcaggaaacgctttcaagaccggatcatcctccttcacggaagggcgtagagtccaatgaaaacccggcgtcatggcagtattttagccccgcatccaacagggtcaaggttgtttccgcaacagacggccaaagcggagaaaagaagcgtccgcttccgtttccggaaacagtccgcacgccgcgcgcccggccctttcaaaaaaaactccgcccggttcgttccggacggagttcggcgtaaggcgccagcgcctgagacggttatttccgggaggaaaaaatgacttcattaatgatcgcctccggctggggagccttataggtcaggcgcacggcagaagttccggcagggatggcaaattcagagacaccggggccggcgttccgtttgccgaccggcgtccaggcgccttctccgcggcgggcctggatggcgaaggcggcggatcccaccacgattactttggtagccttgggattgtccagattgggaacgactatgtccagcggcttgtcggcacggtaaaccgttttcaggtttctgtcgctcagggaaaccaggctggtgccggggtccgcgggaggaacgtcaaatttgaacatgttcagaacaatatcctgctccctgccgcttttattaaccagcttcatccccttgattcccttgggaagctggttgcccctggcaatgaagtttttgccctgtttgtccagcttctggactacgggcttggaagaaccttccacgtccagcaccacttccgcccaggagttgacgtcatcccgttccaggttgacttccagccaggtagcgtccgtggggccatccagctgcagggaaataaattccccgggtttcatcttatgcgtttccatcacgcggttgatccgcacgattttgtcggatttctgcacggaaacgccctccagccccgacacattggaggaagccatagcggaaggaggcgtgttgacggctatttcccgcacggcagtccagacagaccggccgttgcctgtttttttcggttcaatgacgcggtagcgtacggcacggagcaaaaccggcttgggagccttccagaccacctgcatgccggaagtttccggccccagcggtttccaggtttcgaggtcgcgggagccttccagctgccctttttctacatagtcgccgtccttgtcattgcggcccatcagcacttccacgctccgcacggggatgggcattccgtagtccacgccataccagtcgcccggttggccgtaggcgccggagtgccagaaggagccgcgatccccgtcacagaagagttccgccttatccatgctgccccccttgaccaggggcttgggagaaagggccggcgcgccggcaatggccggaaaaacttttttggagacaatatccgccagttcattcacggcgggggccatcacacgggaaccggtctttaccgcagaacggtacaactgtccttcctggttgtggcggcgggaaattccatccatggccgccagagcctgcgtagcctgcaccagccgggtcgcggcttctctggcgttgttttcctccagcgccgctacagcgtgctgaccggcatgccccagttgctcaaaggcatccacccacgcgcctatttccttcatcagccgcggattgttcgccttggcacggatgacgggcgcagcggcggccatacgggcaaattcctttttgagcagggccgtatccttcttctcaatcttgccttcccgggcggcttccagcacgcgcttgactacgggctctatttccacggattcctcacgccggtagccgtgaccgttagggccctggtcggagttgtggttcacaaaaacctgcatggcttccgccgctttcgggaacaggcgcctgactccttccttccaggcctcatcagacttgaacccgttgatgttccaggagtagtccgcaaggccgaagagggagaccttggaggcctccggcttatccatggggttggagacgaaaccgcccatggattccttcgctcccggttccgaggcaaggccatacacgcggcccatgcagaggttggaacggcagtagtccgtgacggggaagttccaccagacgtaggaagggcgcttgattctcctgttcacccattgctggccttccagcgtaatgtcatggcaaacggagttccccgtccacatgacgtggatggaggggtccagacggtcccccagaatgtccagataggttcccggcttgggatcggcccagccgcggttgtactccgtggggcacatgaccaggggggtgacgtccttcttcaccttgacaaattcgtcattgatcttgttcagcagaagggcctgcatgtccccgcgcttgccttcgccgaagatatcgtcaaaaaacacggcaaaggaacggacgcccagcttgtacatcatctcaaactttttgatgacgttgttcatgtcttcttccgtccacttgatatctttgccaggatggatggcccacacaaaatccacgtggttttcctttgccaccttcaccagttccctgatctgggcggcctggtccgcgggataggggtccctccagtggggggaagagtggtagggatcgtccttcggcccgtagatgtatgtgttcatcttgttctggccgtaaaagcgcagctggctcaaacgggcttcatggctccagggggtgccgtaaaaaccttccaccgttccgcggaattcgatgtccggccagtctatgatttccccaacgggcaaaatcacgccttccccgccggccttcgttcccagctgccgcagcgtctgcatggcgtaaaacgccccccgttcgtcatgggctcctatgcccacctttccctgcggagaaatcaccagtttgtaggctccggatttctccggaactccctccagcagcttgctgccgcccgccttggcggaacgtatggtcacggacggcttcccggagaaagcaaccgtctgggtggtaaatttggactgttggggagacggatatacggcaggagtcgccgccagggcggaaccggccagaaaggccgccacgctcaagccacattggagaagttgaaaaccattcatgatgatgcgcgataatggaaccagaaaacactttccacctcaagaaaaaacctctctccgccatcagaccgtcgtcaccggtggaagaaagcccccggagcccgcacgggaaccccggccgggctggacgccaagggcgccgcatcccccttcccctgccaggagttcaccacaacgctgaaaaacaaaaagaagagccgtgcggactccctgaaaagtcagcgtcatcctgctttagaagacaaatttgaccattgcatcacttgaagggaaggttcatcatgcggaacatgctccggtgcatgttgattccttttctgtgtcttctgggcctgttctgttctcttcaggcccaggatgccccaatattgaaaatcgcggctctgcaccccgttctgggagacatggcccgctccattggcggcagccgcgtgcaggtggcggacctgctgcgccccaacggcaacctgcacagttttgaacccgcgccgcaggatattgccgccgcgggacaggcgagcctggtgctggcctccggcaaaaacctggagccgtaccttcccaaattaaaggacgccctgggaggcaatgtgcaaattctggatcttggagcctccgttccggacgttcccgtggaggaagacaccgcagaccatgaccatgaacacgacggagactgctgcgcccacggccccaacgacccccactggtggcacaccccggccaatatgaaacgcgccgcccgcaccctggccgcaatgctcacgcggctggacccggcccatgaacaggactataaagccggcctggcccggtggaacagaaagatggaccagctttcctcctgggccagaaaggagcttgcggacattccggaaaaggaccgcgtcctggttacggggcatgcggccatgaaccatttctgccgggaattcggcttccgcagcatcagcatccagggaataagccgtgaagacgaaggcaactccgcccagctggcctccacgctgaacaagctgaggtccgccggggtcaaggccctgttcccggaatactcctccaaccccaagagccttacggaaatcgccaaatccctgaacatccccgttgccaggccaatcaataccgacgggctggcccctgaaggccacacgttcgaatccatgttcagacaaaacacaggcatcatcaaggaagccctttccccgtctcccagaccatgaccagcactcccctgcggcagttttttcccactctgggagtcgtcatcctgctgggattcttcctttacaacatgacggcgccttctccgggaacacagggaacggcgcatgccgcccctgcggcgccaaccacggatgttcccacggtcatcacggtcagatgcgcccaccgtccggaagccctttccatatcctgcggcggccgccttctctggcagccagaaacgcccgggctgcatgaagaaacggaatgcggcctgccgttgaaagacggctccgtgatcctcaccgtttccgcccgctggccggaaaacacgccggacacccccgtcacgctggaactggaaccggaggggaaacctaccgtctccgccacccgctggtccttcggcccttccctgaacgacagctactccttctcatggaaatgaacagcccagcccctccctgcacccgggatcacatctgctggggcgcgcacgccagccacccggaccgccaccgcctggaagtggacagcctcagcgtttattatggtagtcttcttgcgctcaacggcatcagcttttccatcacctgcggacacacgctggctctgatgggtcccaacggcgcaggaaaatccacgctgatcaaggctctggccgggctgatccgccccgattccggaaaaatcctgtggaacggacgccccctgcacgacacgccgggagaaatagcctacctgccccaacgttccgacgttgactggtccttccccatcaccgtccgcgcgctggtggaaatggggcgttatccttccctgggcctgtggaaaaaattcgggaggcatgaccgggatattgtggaaaagtcccttcacgctctcggtatggaatccctggcggaccgccagatttcagaactttccggcggccagcagcaacgggcctttctggcgcgggctctggcgcaggaggcccatgtcctcctgctggacgaacccttcacaggactggacgctcccgccagccagtccctgggaaggctgctggattccctggcggcggaagggcgtctggtcatcgcctcccatcacgacttgaatacggcggcggatatcttcgacaccatcctgctgatgaaccgggagctggccgctttcggccccccgaaggaagtgctttcccccgcacgcatccgggagatatacggaatggacccccaaccggaaacccaagcttcatgatggatgattttctccaattcctccgcgaacccatcgcgcagcggtccctgctggcctgcgtcatgatcggcttcgccaacggcttcgtcagcgggctggtaatcctgaaaaaatccgccctccaaatcggcacgctttcctgcgccctgctgccgggcattgcggtggcggtgctcctcttcggccttacccgctggagcctgctgacgggggctgtggtggccgccctgctggtgggtctgggttccctcttcgtctcccgtacatcccggctgaaccaggacaccgccctttccatcctgcataccacggctttcgctgcgggcttcatcgtgctggtcaggctaggcctgcagcagaaaattgacgactggctgtttggctccatcatgagcctgtccgactccgacctgtggatcgccttcgccatcagctccgtcagcgtcctgatcctgctgctcttccgccgccccatcctgatctgcctctttgacccggacatcgccaccacgctgggaatcccctcccgcctcatcagctacggcattttcaccctgatcattctggtgctcgtttcctccctgcaggccgtgggagcgttcctgacgctggggctgcttgtcggccccgccgccacggtgtacctgcttaccaacaagccgtcccatctcttctgggggggaggaatcatcggagggctgggctccctgctggctttttacctgtccttccccctgggctggcatctgggcgccaccatcattctggttctgggcgtcattttttgcacagcctatttgtattcatcacggtgcggacgtttgaaacaacgcgggaagaattcttctcaagtacaataacaaagcccattttcatgacaatccatgacacgcagactactagtccgccacagggagcgccattataatgcgggttgtgaaaaaatgtgagatatgctctgcaccggcaacggtgttcctgacacagatcatcaacgggaagtccaccaaattctgcctttgcgccaaatgcgcccaggagcggggtctgctggatccagatgccttcgatctggcagagaaactgttcccgaaccttcagggccaattcggcaaggaaggcgcggcggggcccgccgctcccattccggccctgcaatccctgcccctcacaagctgtccgatctgctccttcacccttcaggattacaaaaacgtaggacgcctgggctgcagtgaatgctacaacgtctttgaagaagaaatcctccctcttcttacccagatccagcctgattcccaccatcacgggaaaacgccggaacgggccgaaaaacgcgaaacggaaacccataccatcagcgatctggaacaacagctttccctggcagtggcaagagaggattatgaacgcgccgccaaactccgcgatcaaatcaaacaattgcgcacgccgaccaattaacatacatgctctttgacgacttactcaacaaccccgccaaatggatggtggaatcaagggatgagcacgacatcgtcctcacctcccgcatccgcctggcgcgcaacctgaccgccaccccctttcccggctgggccacacgccagcagagggaggaaacgctgaagctcacttccggagaagcgcgccaaatccccgtcatgaagggaggctattatgcggagctctccggacttacccagcagcagaaacagttgctggtggaacgccacctcatttcccgggaactggcggcgcgttcggaaggctgcgccgtcctcatctcccgcagccagaatgccagcatcctctttaatgaggaagaccatctgcgcctgcagtatatcctgcccggcatccagcttaaaaaagcatggggggccatctccaaaatagactccgaactggaggccaggctcccatacgcctacaatacgcggctgggctacattaccgcctgtcccaccaacctgggcacgggcatgagggcctccgtgatgatgcatctgccaggcctcgtcatctccgaacagatgcagcaggtcgttcaggcggccgcgcagctcaacattaccgtccgcggcctttacggggaagggacggaagccaccggtaaccttttccagatatccaaccagtccacgctgggggacagtgaagaccagattgtggaacgcatgacccgcttcacctccgacctggcccatcaggaatggaacgcacgcaggcggctgctccagtcatcttccctgcaggtgaaggaccgcgtttcccgcgcctacggccttctgaccaatgccactctgctttccacgcaggaggcgctggccctgctctccttcctccggatgggagcgtctctggacatcttttcccaccaggcattaaaaaacgtcaataaaaccatcatgaacatccagccggcccatctggcccgcctgtccaccacggaccaaaccactccggaacacagggaccagatccgcgctgatattattcggaaagaactttccggcaactaatgcaaccaaacaatttttttgaccatccatgaataattttacgcctagggcgcaacaagtgctggcgcatgcgcgccgggaagcggaccgcttcaatcatcattacataggaaccgaacaccttctgctcggcctgctcaagctgggcaagggcgtggccgtcaccatcctggaaaatctgggcgtggagcttaccgccgtgcgcaaacaggtggaggaacaaataggccggggcacggaaccccaggcggagggcaacatcccgtacacccccagggtgcgcaaagtcctggcaatggcaaacagggaagcccaggaactcaaccacacgtatgtgggcacggaacacctgctcctgggcctcatccgtgacggcgacggcgtggccggacagattctgcgccacttcggcgtggatttggaacaagcgcggcgcgaattgctggacgtgttgacccccaaataccagatggatgcggatgaagacaacatcatcccggacgacgatgacgacgaggaggaaaatgaatcccccgccatcccgacggacgagccttcctccccctcctactccaggcagcagaaatccaagacacccgcgctccaggcctttggccgggacatgacccagctggcccgggacggcaagctggatcccgtcatcggccgcgcctcggaaattgagcgcgtcatccagattctgtgccggaggaacaaaaacaaccccgtcctgctcggtgaagccggggtgggcaaaaccgccatcgtggaagggctggcccaggaaatagcccagggccatgttccggagctcctgcgcagcaagagggtcatctccctggacctggcgctgatggtggctggcaccaaataccgcggtcagtttgaggaacggcttaaggccgtaatggatgaaatacgccgggaaggcaatgtcatccttttcattgatgaactgcacaccatcgtaggcgccggctccgcggaaggctccatggacgcctccaacatcatcaagcccgccctctcccggggtgagctccaggccataggcgccaccacgctcaacgaatacaggaaacacattgagaaggacgccgccctggaacgccgcttccagcaggtgcaggtaggggaaccctccgtggaggacaccatccagattcttgccgggatccagcccaagtatgaggaacatcacaaggtgcattatacgaaggaagccgttgaagccgcagccaagctctcccaccgctatctgacgggccggttcctgccggacaaggccatcgacatcctggatgaagcgggcgcgcgcaagcgcgtctcccagatgacccgcccggaccacatcagcaacatggaaatccgcattgcggaaatcaaggaacgcaaggacaaggctgtggaaacccagctttttgaagaagcagcccgcctgcgcgacgaggaaaaacaagccaaggcggaacttcagaacatgctggaaacctggcgcaactcctatgagaccaactacgttcccgtgacggatgaagacgtgatgagcgtactcgccaaatggacgggcatcccgctggcccggatggaggaaaaggaaaccaccaagcttctgcggatggaggaagagttgaaaagcaaagtcatcggccaggacgaggcggcttccgccatcgcccgcgctctgcggcgcagccgtgcggatatcaaggatccgcgccgcccgatcggctcattcctcttcctgggccccaccggcgtgggcaaaacctatctggcccgcaatctggcggaaatcatgttcggtacctcggacgccctgattcaggtggacatgagcgagtacatggaaaaacacaccacgtcccgtctcatcggttctcctcccggctatgtaggccatgacgaaggcggacagctcacggaagccgtccggcgcaggccctactccgtcatcctctttgatgaagtggaaaaggcccatccggacgtcatgaacctgcttctccagattttggaagaaggcagcgtaacagactcgctgggacgcaagatcaacttccgcaacaccatcatcatcctgacctccaatgtgggggccgcttccgccaaacggcagagcaccatgggcttcggcgccatggccgccgacaacgcggactacgccgccatgaaggaaaagattctggaagcggcgcgcaagcaattccggccggaattcctgaaccgatttgatgacatttctgtcttccgcatgctggaacgggacgacctggaacgcatcgtgcatctggaagcggacaagctcatctcccgtctcaagaccaagaatatcacgcttgccctgagccaggaagctctgagcctgatcatcaagaacggctatgacccgcagtacggcgcccgcccgatgcgccgcgccatcgaacgcctgctggaagacccgctggcggaatccctgctgaggggagacgtgaaacccggcgataaaattgaagccgtggaaacggacgggacggagacgctcaccttcctgcacatcaaggacaaaaaaccagccaggcccaaagcgccgcgcaagagaacgccgcggaaacccaaggcggaataaacgcttttaggcttttcaaccagggcccctgcatgttgacatgcaggggccttttcattgggccggattccgcggaactgccatttccatcccctgaaaggacaatgaccctccctgcgtatttacgggcatgatctcatcctttcccagaattctgatctttctgatgatggcaagcctgcatgtattcgcggaagacatgcagaaaaacagggaacgggaagccgcccgcgcagtcatcatgcggaccgtgccgtctctggccgcctccccggaaaaactgcacctggaaaccattgaaaaagaagacggatatgatgttttcgagacgaaagcctccggaggagtgctgacgatccggggaagcagcggcacagccctttgccggggattctatgattttctgaaaacgaaccgtctgggaatggtatcctgggaaaacaaggacattcgctggccggcacagctgccggacaccgcgccgcgccgcatcgtttctcctttccgcaaccactattatttcaatgtggtcacctatggatacacgatgccctactggacctgggaacgctgggaaaaggaaatagactggatggctctgcacggcatcaacatgcccctggctctggttgccacggaggggatcgccgtccgggtctggaagcaactggggctgacggaaaaagaaatagaagaattttacacggggccggcccatcttccctggcagcggatgggaaacatcgtcaatcatgacggccccctgcccgccagctggcacaaggaacaaatcgccctgcagcaccgcatcctgcacaggatgaaatccttgggcatgacccccatttgtcccgctttttccggtttcgttccccggggaatcctccgcctttatccggaagcgaagcttcaccggctggggtggggaggctggcctcaaaaaaaccacgcccattttctttctccggaagagccccttttccttaaaataggacgcctgtacatgcaggaatggcagaaggaattcggaaaaaacacctattttcttgcggactccttcaatgaaatggaacttcccgaaaacaaaggaggcgtcgaagcccgcaacaatatgctcagctccctcggggaacaaatctaccgctccatttcctccaccaacccggatgcggtatgggtcatgcagggatggatgttcggataccagcgcaatatctggaacgcagatactctgaaggctttgctcagcaaggttccggacgataagatgctccttctggacctggcggcggattacaacaagactttctggcgcaacggcatgaactgggacgtcttcaagggttttttcaataaaccgtgggtttacagcgtggttcccaacatgggcggcaaatgcgccatgaccggggtaatggatttttacgccaacggccatctggaagccttgaactcttcatccagggggcgcctctccggaatgggcatggccccggaagggatagaaaacaatgacgttatctacgaactggttacggacgccgcatggagggaccgccaggaggacgtggaacaatatctggaaaattattgccgtgcccgatacggaaattatccggacagcatgaaggaagcctggaatctgttccgccgcacagcctattccaacttaaaggaccatccccgtttcaactggcaaatgaaacccggcacccgcggctgttccgtaaacacaagcgaagattttctgaaaggcctctccctgttcgtcaacactcgcggcctggaacagtcccccctgttccgccaggatgccgttgagatgaccgcccattaccttggcatacgcatgaatgaagccatcctggccgctctggaagccctggatgaacaagacatggagaatacgaaaaaatgcatggaatatttccgcaaatacgcccttcgggcggattcccttctggaagggcatcccacctggagactgtcgcgctggttatcatttgcccggtctcacggaacttctcctgaggaaaaaaacaagtatgaacaaaacgccagaaggctggtgaccagatgggggcctcccgtagacgactacgccgccaaaatatggagcggccttatcagggactactatctgccgcgctgggaacactttattcagagccgtctttccgaaaaaaatccggatatgggagcatgggaggaaaaatgggtccgttccactggcgtaagcgctgcgcacgctcccggagatctggtcaacgcctgccgccaggctatccgggaggcgccgcccctgccttcttccctgaaaagaaaagcagccggatcaattataggaaactggacctccgcgacggtatccacggaatggagttatctggactggcccgtttcttccgctgatcttgaaaaactccggggggtgcgcttcgtcttcacttccggcagccatgccctagaaatagacggcgtcgaactcctggaaaacggcaaagtaatcgcccacgaccggcacgccggattggcaggcaagccttcccgcgggaatttctacaaactttcccttcccaagggaatccatgccaacaacggatgctccctcagagccagggtccgctccgtgggcggaaaatcctccaatgggaaactggaactgattaaagaatgaacggcttaaattcagttagaattatccactttaggtttgacaaatatcaccaaaattaacttataaatagtcataaattattttgaattaaaatagatctatatttcaaccattgtaagtcagatcttctacatcaagggaacgatttttgaaaacatctatcttgacttatgtatgttgttgtatgcagataaatcatctacacgaagtatattgcactagatacacaaagcaatggagaaagaggaatacaagtaaatatttgaagctattattaaagtgaacgaaaaccatgtagtggataaaccttgctaagacaataaacatggagaaacaaatggataaggatgacgaaaacaaaccaaagacaaaacgaggcaagaggacatacacaactactttgattggggcgaaagaatataataccgaaaaaatccatgcagtaatttcaaattttaacaaacccgacaatctattaagtggaaaacaatatctcaatatttccaaaaaagttcgcaaaaaaaaataacatccataataattgactaatcttcagtctacaacatacttgataaaaaaggaatgtgcttttatgtagttgaaaattgaccattccgtaactttttctcttgaaagcaggatacacatgaatggaattgagagcttttgaatactgttcacaatggtttttgataaattggccgagttgttcgtggcttgataattttagaagatggtattataattcttgacatctattttcgtactaactaatcacacgtccatgcaggaagcaggaagcaggaagcaggaagcaggaagcaggaagcaggaagcaggaagcaggaaacgcttcctctccaatgtgatgatttcgaattaactaacgaatatctagattatttatcagagcaaataatcacatatataggaaacaagcgatccctgcttgattttataggaaaagggatagaagtggtttgtaagaggttgggaaggaacaaaataagcagtttggatgctttttctggttctggggtggtttcccgatatttgagacgcttttcttcaagcctccattgtaacgacttggaagattattcaagggttatcaatgagtgctacatgaccaatgaatcttctgtagatattatcttgcttaaaaacgagctatcttgccttcataaaagaattgaagaatcttggcatgaaggagttattacaaaaatgtatgctcctgccgatgaagataatataacacaaaatgatagggttttctacacaaaaaggaacgctatgtacattgatacagcaaggcaagcgattgatgaacttgctcctgatctaagaaagttcttcttggctccactgttgtatgaagcctctgtgcacaacaatacatcaggtgttttcaaggggttctataaaaatcacgaagggattgggcagtttgggggacatgggaaaaatgcactaaaacgcatattgggaaatattgaactgaaactccctgttttttctcgatttgatgttgactgctacattcaccaacaggatgcacgacaactaatggaaacaatacaggcggttgatcttgcatattttgaccctccttataaccaacacccctatggctcaaattatttcatgctcaatttaatagcaaataataaaaaaccactgtcattttcccgagtttctggaatccctgacgactggaaccgttctctctataataaacgccaatcagctcagaatgaattgttttcaaccgtccaagcctgccccgcaaagttcatcctaatatcttataattcagagggatttgtgaaatacaacgactttatcaacttcctctccaaaataggtaaattgcaatccttacaaactgattataacacattcagagggtgcagaaatcttaacgaacgcccaataaaagttaaggaattcctcttccttgtcgaaaaattctaatagccatctcactatgtctcataaaattgcattgcgtacccagcgggaaggtacaattattaatactacttcatccaagcaggaaaaattattacgtcaagctgtgaaatctgtttctatgcgtctgaaaaagaaatttcccggaatcacccttgaatgggaaccacaagctaaattgatagatattattgtccaccttcgaacccaattccctgatgttgactttgcagccccctcgtgcgcttcttcaatgaaaccagacggtggaattctttatatgaaaagtgaagatgaacggcgatttcctatcctcatatcagaaaagaaaaaccaaggtacaaatgatatgagggcaaaggaaggaaaaaaaagacaagctcaggggaatgccatagaaagattaggaaaaaacgtcattggtttccgagcttccatgattagagagtcaatttttccctttgtttgttttggagatggttgtgatttcgttgaaggttcatccataagagaccgtgtcatcaccatagccatgttcggtcagctcaacaaagaatatgtttatgctcaaggtcgaggagaactttttaacaggggatctttctatttccgagaaaaacaatggactgaacaagaaatggcagacatctcgttctctatagccagcaaagccatcttctattatttttccagatatggagaatcaacttttttcgataattgattggagcacatttttaaaattattcaaaaaatattctagattttaatatttagcaaattactcagatgaaaaaacagagaagctcaataaaactagactaaaataaacaatctcgatattttacagagaatttcgactcaaaacgttcaaaatcagtcgattttaaattaaataattctgaatttaatttgcttattaggaaaaaccacatccattccgtgccttttacgttagaaaattccgccgtccgaaccaggaaacagcatgcccggcgccttgcggaatccccgcacggaacaatcgggcggaaagttacatttcgaaccggtgcaggttttccacatgggaatatcccatcttcctgagcacttccagcgccttgtccgccctcttgcccgtacggcaatacagcaaaatcacggcattcttatccggaagaagctgcgcggcccgttgttccacctcatctgccggaatattcaaggccccctccttatgtcccgtgcggtactcctccggagttcggacatccaccagcacaatagggcgcgccatgccgctttccggagacaccaccatggcggcggaagcaggggcgcgttccgcattcctgcttttcagccagacgaagagggcagtcagcccggtcaccatgaccacgtacaaaaccacatttttcacgcggccacttcactaaaccgcggcgaagtaatcaagagaaaataacgctccgtccgcagaagcgggaagggaaagaactttcccttccccaccatatccggaaaggccggagaattgtccccctacccctcatcatcaatcaccacagcctgggaggcgaatccaaaagcggggcttccccattccactacatccccgagtttcaaatataccggaggcttcatccccatccccacgcctcccggagtgccggtggaaaccacatctccgggccataaggtcatgaaccgggaaacataggcaatcaggcgcggaacaggccagatcaagccgtccgtattgtcgctctggcgcacttccccgttcaccttcaattccaggggaatgccggcaccgtccccaagttcatcagcggaaatgaacgtggggcccattggggcaaaactgtcataactctttcccttggtccactgtccgccatgttccagctggttggccctttccgaataatcgcacatcagcgtatagccgctgatagcccgcgcggcctcctccggggaagcgtttttcagcatctccttaatcactacggccaattcaatctcataatccagcttgtcgcagccgggcggatacaaaacgacatcgctgcaggaagtaatggcggaaggcgatttcaggaaaacagccggctcctgcacggaatccccgtcaaactccttcgcatgatccgcataactctttcccaggcacaccagtttggaaggagaacagggcagcgcggtatcaatcatccattcagggttgacagctttggcggcggcactatccagaaacgcggcaatgcgcttcatttcctctccgcaggaccccgtttccccacaaatgcaggcatccacctcggcaagcacggaatccgccgccaggtattctccgcggctttcgctccacagagccatgacgcgctccgcccggtcattcaggtaaaatctgatcttcacccttccatcctacaaagctcctccttttaggcaaagggcggttccgtcattcttcgctccggcggttctcttccgccgcccggacgctctgtgaaagcatgcagcgcgtagggcttgcgttaccggagcaaaacattatcatgccaccgcttaacatcattaacctatgtccgatcaaatctacttttttgacactaccctgcgcgatggagaacaatgccccggagcatccatgaacctacgcgaaaagctggaagtggcgcggcaaatggaacggctgggcatggacgtgattgaagccggctttccctgcatctccgacggcgactttgaagccgtgcacaccatcgcccgcgaaatcaaaaaatgccgcatcgcaggactggcccgctgcgtgaaggcggatattgaagcggcggccagggccctggaacccgccggggaacgcgcccgcatccacatcttcctggcaaccagcaagctgcacatgcagttcaaattgaaaaaagcggaatccgaaatcctgcgcatggcggcggaaggcgtatcctatgccaagcaattcgtacaggacgtggaattttccccggaggacgcttcccgcacagacctggattttctgaccaaagtcgtggaaacggtcatcgacgcaggcgccacgaccgtcaacattccggataccgtaggctacactactccggacgagttctaccgcattatccgccacctgaaggaacatgtgccgaacatcggcaaagccgtcatctccgtgcattgccacaatgaccttggcctggctgtagccaactccctggcagccgtccgcgccggagcccgccaggtggaaggaaccattaacggcatcggcgaacgcgccggaaacgtagctttggaagaggtcatcatggccctgcgcacccgtgccggacaattcggagacgtcacggacaacatcaacacgaaggaaatcgtccgcacttcccgcatcgtggcccgcatgagcggcatgcaggtgcagcggtccaaagccatcgtgggggaaaacgctttcgcccactcttcaggcatccaccagcacggcatccttaactgccgggaaacctatgaagtcatggacccgcaggcggtcggctggggcgccacggaactccctctcaccaagcattccggacgcgccgccgtcaaatccaggctggaacagctgggccatgtcctcacggaagaggaagtcaacaccgtctttgaacgcttcaagaaagtgggcgactccaaaaaattcgtttatgatgatgatctttccgccattgtggacgactccctgcatgcctccaccggcctatgggaactggacttcctgcaattcgtggcgggcagccacgcgcgtcccacggctacggtgggactgctcaaggaaggcaagaaatttgaagacagctctacaggcaacggcgccgtggatgccgtcatcaaggctattgaacgcatcactaagcgcaaaggcacgctgaaaggctacagcgtcaacgccgcttccgaaggaaaggacgcgctgggagaagtcacggttcatgtggacttcggccagcccaagcccattgtgggcaagggagcctccacagacgtcattgaggcctccgcccgcgcctacctgaacgcggtcaaccgctccatccgcatggaaaacatgccccggcccaacaacctggattcaggaaccatctaacaaggaaagcgccccgttcgcccgaacggggcgcgactctgcccggcagcctatcatcctctacagggcttgcatttccattgctcccatgtcataaggatcaagactcctataccgcaccaccccatgaaagcgacaccactccttctctgcctggcgtgcagcgcgctggccgcaccgccaacaaaaaaacagccggaacccgccgaaccgctgcccgccctggaaaaaaacaccattgccattgacggccatccggaaagcgtggcggcggatgccgagggcaatatctatttcacctgcatcggctccaggctcacacctacggaaaaagacaaggacggctatctgggcgtcattccgcacggttccacagagccgaaaaaaatcacggacgtagataccctggacgcgccgaaggggttactgtatcaggacggctttctttactgcacggacgtggacatggtcttcaagataaacgccaagaccggcgctattgaaggatacgtggacttgtccccgtcccgcatgaaattcctcaatgacctggcattcatcaacggcaggctcatggtttcctccacggataccaaccagattttctatgtggacacgaataccagctcctatggggaactggtcaccaaacagcccatctacaagccgaacggcctggcctgggacccggaaagaaaggtcatttacctctgcgaatacgcaacggatgaaaagggcaaacccagcggacgcctgctctccatcaaccccgtttcccgggaagtcacggaactttccaaggaacggggacagtacgatgggctggtgtaccgtgacaacgccctttactacagcgactggtccaaggataaaaaaccggaagctgtccgcaggctggatctgaaaacggggcgttccgccccggtagccaccggccctgttgaaggagcggcggactttatcctgtatgactccatgatggtggttccgggcatgacggaaaagaaaatccacatcatgcccattggcgggaaaaaataaacacggctgttccgcttttattccccttatccgggccgccgcggcatttcctgcgctggcggcctttttcaatttacggcttgaagtacacctggggatgcgcttagttaatggaaatatgaacaagatttccgaccaaatcatggaggggatgaaaaccgccatgaaagcaaaagataccgttaccctcaataccctgcgcgccctcaagacggccctcacgaacacggccatcgccaagggaggcctgggaaccctgctggaagaagcggaagaactggccgtagtccgcaagcaaatcaagcagcgtgaggactctgcggagcaattccgctccgccggacgcccggaactggcggaaaaggaagaagctgaaatcgccgtgctcaaacagttcatgcccgcggaactcacagcagaagaaacggcagccattctggaaaccgtgatgaaggaaacgggagcctctaccaaaaaagacatggggcaggtcatgaaactcatgcaggaacgcacggccggcagagtcaacggcaaggagctggcccgcatggtgtcagccagactgtcatgaaatgctgcgccgccatcatcgttgcggccgggtcctcccggcgcgccggatttgacaagctgctggcccccctgcacggagtcaaggtgctggaacgcagcatccgcgcctttgccagctgccgggaaatcacggaaatcgtagtcgtctgcccggaagaacgttttcatgccattaacggcgcggacctggaaacggaaatacccgttacccgtgtggatggaggggcggaacggcatgaatccgtgcagaacggactggcagccctgctttataccccggaattcgtggccgtgcatgatggagcccgcccgctcattacggcggagcaaatctcccgctgcattcaaaccgccagggaatatggggcggcggcttccgcacatcccgtaacggataccctgaagcgtgcggataaagaacgctttacgattccggaacaggtggaacgggacggcctgtggtgcatggaaaccccgcaggtcttccaatatcctcttctgctggacgcttatgtggaagtcacggaacggaatatccaggtaacggatgaagtcaccgccctgcagctcatcggccatcctacgcgcctggtgcataatcatgagcccaatcccaaaatcacatggccggaagacatttcccgcgctgaaatgctaatggacctcaagcacctccgcaatgactcatgaccagctttctgtgtaaaaacccccgcgtcattctcattctgggcacagggtatctgggaaaagccttggcggaaagtctgcggaaagcgggacatacggccctgacggcggatattgacccgcaaaaagccatttatgaagccgatgtcgcagaccgggcctccatgcaggggctggccgcccgcatcccctccccccagatcatcgtcatgtgcgccagcacgagaggaggcggagaggaagcctaccgcaacctttacgccaatggaacgcggaacacgctggaagcctttcccggaacgccgctcatcttctgttccagcaccgccgtctatggaatcacggacggacgctggattacggaggaacacaacgtctatccctcctccgtgaaaaacggtctgctgattcgggcggaacaggcggttctggcggcggggggcacggtcgtccggctgggagccctgtacgggccggaccgctgcgttctcgtctcccaatacttcacgaagggcacggccctccccggagccatggacagatggctcaattacatccaccgggacgatgccgctgccgccctgcacctgctctgcaccctgcgggaaccacctgccggcatttacaacctgacggaccgcacccccatgcaaatgggagaaatatactcctacctttccaatttgctggggaaacccgctcctcagcctgaaccgctcccggcggaagcgcgccggggcttctccaaccagaggatttcctgctcccgccttatggccctgggctgggaaccgctctacccaagctttgcggacggtgtgcacaatgtgctggaggcactggaagagtaattttacccccatccttttccacgctgaccggccctttccggacattccataaataagaagaggcatcccttctgaacgcatctcgtgaggcaggcacatgccggaaaaaaatccagccgacggcccctcctgtctttgactctcccctttcttgacttgccgggcgcgaacaggcaaaatcccgcgcgcaatgcgtatcatcacaggtcttcaacccagcggcaagctgcatgtcggcaactacttcggagccatggaaccggctgtccgcatgcaggaaagcggggaatctttctacttcctggcggactaccacgccatgagcaccgttcacgacgcgaacgcgctgagggaaaactgcagcaacctcgctacggactttctggccgtgggcctggatcccgaaaaatgcgtctttttccgccagtccgctgtgccggaagtcaatgaactggcctggatactcagcaccgtctgtccgatgggcctgctggaacgctgtcattcctacaaagataaaatcgccaagggattctcccccagcaacgccctgttcacctaccccgtgctgatggctgccgacatcctgatgtatgactccgacctggtgcccgtaggcaaggaccagaaacagcatctggaagtcacacgcgacctggcgggcaaaatgaacgaacaattcggagaaggcacctgcaaacttccggatgcgctcattgcggaaagcacagccattgtcccggggctggacgggcagaaaatgagtaaaagctataataacacgctccctattttcggagaggaaaaagctgtccgtaaactcatcatgagaatccccacggattccacccccgtggaagatcccaaaccgacggaaggttccgtcatcctgcagctttacaaactctttgcctccgcgcagggttatgaagatatggtgcgcggtttccagaacgggggatgcggctatggagacttcaaaaagcgcctctttgacgcttactgggaatacttccggcccgcgcgcgaacgcagggcggaactggaagccaatcaggactatgtgcgccggacgctggaagaaggcgcccgcaaggcgcgcgagacggcctctgtagtgctggacagggtgcgccgcgccgtggggctggcctgaaacggaataaaacggaacacccgggaaagccggggcagcacacgtttttttgtggcatggaaaagtacggaatgttatacagaaagatatgaagaatattctggtagctattgatttctccaacgccacggacgccgtcatccaccaaatcggcaaactggcctgccccaacgacagcatcatccatttgctccacattgtggaacccagcatttgctatgaagtctccggcgttctgccggatgaagtgcccgttcccgtgatggaccagacggaagaaaacgaagtcatttccatcgccaaaaaccatttgaaacagacggcggaaaaactctcccggctgacggacgccacgatcatccaggcggtggaagatgaatttgaaatcagcgaagcagtcattaattatgctgaaaaacaccacatcgacatgatcgtggtgggcaagcataaccacggcttcctctccaccgtctttctgggcagcgtagcaagctccgtgatgcggaaatcccccgtgcccgttctggtagtgcccgtcaccagggaagaacagtaaaaaccgccatctgcgccagctccgtcccaatccatgattaccatactctttataggcgatgtggtcggcgaacccggacgcaccgccgtgaagcacatgttgccggaattcaaacgggaacacggggcagacttcatcatcgtcaacggggaaaacgcggctgccgggagaggcatcacgccccgtctcgcacaggaactgctgcacgccggagtggatgtcatcacaacgggagaccatgtctgggaccaggcggagctggccccgtggctggaatccgaaccgcgggtgctgcgccccgtcaactatccgcagggaacaccggggcacgggagcgtagtcgtggaaactcccaaggggaaaatagccgtcatgcaggttcaggggcgctcattcattcagccgccgctggaaaaccccttcctcatctcggaagcggaagccaaaaggctcagggaagaaaaaggcgtgcgggttatctttgtggacatgcacgcggaaacgaccagtgaaaaaatctccaccggctacaatctggacggcctggtttccgccgtcgtcgggacacatacccatgtgcagacggcggatgaaaccattctggagcgcggcacggcctacctgacggatgccggcatgtgcggccctgccgtcggggtgctgggacgggaacgggaacctattctccagcgtttccgcacctccatgccggccaaattccccgtagcgaactggcccgtgcgcctctgcggagccgtcgtgcaaatagatgaagccacaggcagggcgctcagcatcgcccgcatcaataaaatcgtggaaaaaccggcctcctgacatgcatgcttcagcagcattcctcttcccgtgcccggtggcggctctctgcggatgttccgaacatggcggaagcctcgtgaagcgcgaccagaacgcggattataagaaaaacctgtttcaacggacgccctccatcacactcgcggaaggaaaaagctgccggcgtcccgcctccccttcccggaataacgggaagctggctgtggcgtccggaatccaaggatttcccgcgtttccatattttcaggatgaagcaacggacagaaacccgggcgcccttattccccttaatctcccatactccggaacagacacgtgatcatgaactatgaagccagattcggcggtataggccgcctgtacggaaacagcggactatctcttctcagaagcgcccgcatagccgtcgtcggcattgggggtgtaggttcctgggcggcggaagccctggctcggtcaggcgtaggcactatcattctgatggatatggacgacctctgcatcaccaacaccaaccggcaaatacatgcgttggcgtccacaatcgggcaatccaaaacggaaaccatggccacacgcctccgggaaatcaacccggaagcggaagtcattcccatcagcaatttctacacggcctccaacgcggaaaaactgctgtcggcggaaccggacgtcatcattgacgccatcgactccctgatacccaaggcccacctcatcgcctcctgttaccgcggcaagcaaccgctggtaacctgcggtggcgcgggagggcgcatcaatcccgcccggatagaaatagacgacctctcccgcaccaggggggatcccctgctctccagcttacgctacaggctgaaaaaagattatgcccttccgcttggagaaaaagcccggaaactgaaaatcccctgcgttttctcccaggaaacgcccgtatatcctacctgcgacggaacaacctcctgcacacgtgatccggaattccaggggaaaatgggttgtgacgccggatttggctccgtcacccatatcacgggaacctttggcttctttgcggcttccgccgccattcaaatgctcttaaataagaaaaaaacaccatcgtcatcatgaacaaacgcctgcttcccctgctgggggccgccctccttcccgccttgacccagtgcaacaccctggaaaaagacattgccggcatcaacgcccgcaatgcggaaatagcccgcgaacccaggggaaactacttcgtcggccgccgctaccatgtaccggcaacgcgcttctggggatacctgcgccagccgggccagacttggagaacggcccaactcgtcatcatggatgaaagcgcctgccgcaccccggaccgcctgccggaatacaccggaaatccgcgctacgcctacgacaacaactatgaatacagggtatacggcaaatacacgggcaaatacggttacgaacccaattccaatctgaggctgcccatcttcaaaccgaccaggtttgaggtggccaacaccacccccggctggctcttcaaaccctcggaaaaatatgataccggagccgttactctgcgccctgctatcatgcccgcgacaacctccctcccggtccggtaagaaaaacctgtccgcaaaaacgggcccggaaagataaaaaagaagaaaaagcttgatattttcatttctctgcgctaaaaactccccgccttaaggcctccatgctcaggtggcggaattggtagacgcgctagactaaggatctagtggtgataaaccgtaggggttcgagtcccctcccgagcaccaattgataaacctcttaattcgaaagaattaagaggttttcctttacccggattgcaaggtctccaatttatagccattatcaaaatcaggcacgaattcgcaaaattcggaacacgtttggtagccattggtagccgaaatcgctcttccaaagccacatttacagtcgcatgtacaaccttgaatgttacaggagcatttttgaggagacattttacatgacccccgtcatttttctgtttttgaagacttcttccgggagtgacggaattcaaggcatgaccctgtcgtggaaatgtgctacaaagaggcaatgcccaaaccttccgtcatacgatgcgttcttgatgaacaacgcaaggctcaaaacaggaaagcggtctaccgtgtttccataccggcggagttgtcggaaacaggcaagaggcagaatcgttattttacgacacaacgggaaggaaacgcttttgccgctcagttgcgaacgagaaggaatgcggaaggaagcagcgtgttccaggtttctgcggcagaggctcagttgttccgggaggcgcaggacattctggagccttatggcgtggatgttttcggttttgtgaaaggaatggccccggtgctggaactggtgcaggaagtttcggaaatcggacggcttgtccggatggggctggagcaggaaaagagagacagcaaatccatccctttttgtgacgcagtatcaaggctgctggaagtgaaacaagacgttcagaagcgtcgggaaagtacacttgcacagatccgctacataaccggacgcatcggcaaatgctgcccggatttcgctgtgacattgctctctcagctcacgacggaagattgccggcagatgatctcccaaaccttcaaacctgataagcagaagaatgatgcacggaaaatcctcagcagtatcttcaacttcggtatcaagaggaaatggtgccgtgacaatccggctcaagcccttgacattatttccattcaggaacatgaaatccatcccttgattccggaagaaatacaggccttatttatggcgtgccgtccaccatcgccggaagagaaggctcagcccaaaacgagaaagaaaaccgtagaaggtgcaagattggatttgacctgttgcctggctccgcttgcgatcatgacgtttgccggaattcgcccgcaggaagtaaccaggctgacttggaatgacatctttttggacactccgtcaaaagtcatcaaagtacgcagtatggcctcaaaaacgggagggacacgtcaagtaagtatatgtgcggcattagagtcttggttgcgcatagctcctcgtcaggaggataactccatatgtccgccccagtggcccgtccgatgggcagggcttcgttatagagcgggatgggatgccaatgggaaacgatggcctaacgacgccttgcgccacaccttcgccagctaccatgtccttactcatcgagacattccccggcttcaattggaaatgggacactccagctctacccagatcatgcaccgttacatgaatctgtctggggtggatcaagagatggcggagtgtttttggaacatcgttcccgaagaagatttctacgctgaccggaatgcataacactgcctactgattcataagtcctgggatatcttcttctcttctcacttatttttagtttgtttgtaggaggaaagagaaatagacaccatgaaagcgtcaaattcagcggcatgatgcttctgaattcccccatggggacggatcatcctgacatgatttgaactcatggcttctgccagtaatttgcaatggtcgatttactcgtatcgtaacgtttggcaagagtagcctgatctgcccagacgaccgaaccggattcggcagcctgccgggcaagaagaacctccagacattcctaaatgccccttagttcttcaataatgtctcagcagagacaaatgcaccttctatgattttcatgttacttttaggataaatctattatgacttggatttttgttggactttgtccaacaaacaggtagcttaaggatattatgaggttatgttgtactggatcgatgttgagttagggtaagattttgttgactatcaacgcattattatacaaaaggtgcgtcaacgctttttgtctcaaaatcttacatttgagactcttgcttagtaatatcaattacagaatggtggctcgtatttacccccttttccattacatctgctatttttgaaatatattttttgattttatatcatacatttttaattttcatcaaaaaatatgatataattatgaatgtatggtatttttattattttcttcctctgctccctcatctcttttcgcccacccactcacgggtaaagatgacaaaaatccgtcaactctttgttttcttttaacacagcaatcttggtactggaaggccggcgttattaaatggtgttgtctttcatgataggagacccacctcttcagtcattgccgggctagtattcattatttctgtttttcttacggatctatgaaattgctatctgtgaccctataataacctcttcagtaacatgatactcgtaaatatcccgatctgcccggtttgcaaagcaatgccagacaatggcgccggtcattaagaggatgaacaaaagaaagcagacaagcgccttattccttctcgaaaggacgggcttatcatgaacatggggaattgatgggccgcactcctgctcgatgcacctgataagttcatcatgatagtgtgcggcagtttctctgagacaaatgtccggcacttccttgtttttatgatcctcctctttagtaatggatggtctgtttttcattgttgttttccttgttggtgacatgcgttcccctggcaggaacatacggcatggcgtgaaaagggttatcagagacagcacctgccgtgaatgatgagcttgaccagccattgccctcttttggggaaggaacttgaaagatggataatgactgttgctcaattgccacacttgaagaatatcctcgctacaggaatacagcattcccggcctgttggcaaaaacagcgccggcgcataacgaggacacagtatatcggcacatgatactaaaggtctattttatgttccctagcttgcctgacctggattaatcctgcattgaggagtaaaaagaccatactccagcaaatgacggcacatatcccccattttgcataatacaataatgccgacttatacaacaaaggactgttccaaaacatgtgaagccctatcgggataacggcaattcgccaaaaagagggttgaagaatggagggaatgttgttctgccgttgtttcttcatcgcaagccagaatgccccggccatgattgccgaccaggaaacatgaccaaagggagcaaaaattcctctcattaccgctatatccaatggatccggacctgggccggtatattcagaattcacgatataacccgctgtttcaaaaccagcgaaaccggcgcctacagcggcaccacacaacatgccatttaaaatttgcccattcagaaagaattttcgggcaaagaaaatggcaacaacaagttttgcggcttcttcaatgggaccggcccagtaagcagccctgggattaccggaaagctcgttcaaaatcattgtaacaatcaaagacaaaatccctccacctagcaccaggacgataatcgaataccacgagatgttccttctgacattaaattccgcaaacaggacaagaatggaaaagggcacagcaaaacttatggaaaacaacagacctaaataagcggcaccagaaactacaggagcgttattaaatgcctcaaacatgagtctccacccgatgcatatcaacagggaaagcgcgagaatgcgggtgaagagccatggcgaaggccaatccgtagatatttcttccagcgctggggtagatttcgacccgcctgacgtaaaaaaatctatcctttcctgcgccgtcctgcggcggaatacccctttgaatatgcttttcaaactgaatctttctatgggagaaaggccggtcagagatgatagcattccaaaaacccccacccagaaggagctttcctcctgatagccgctgataaattcccccactcttacccactcggccattccctctttccacaggaacgcctcaggagaaagctgtccggtcgcgtaccagttgcttatttccttgaatgtatagggtcccttgcggctttctccgcccgctgaaagaaaataagacgcttcctccttccccggtctggaagcgtctgatgtacccgcctgttgcgaatgcggttcgtccttctttttttgaacttcgcgaagaggaagccatgccagcattccttccgtccataccagatcatctccgctgattcttcgggaagcatatagtttatctatcttctcccatggaaacggccccatttgagttccgtccggcagtttgatcaaataagatttcatcttgcctcttcttgttgtgaatatttctttttcctttcttgaggacgtggaaatgcctgaataattctttccgtgtaccagaacaccgcgatcggccatgggaaccaaagcaaggaaagaagattaaaaagggggcgggattcaggtaaaacgccgtttgctattatactgctcccgaaagcaagctgtgtgagtaggacaaaaataaacatcggccatgctttcagtcggaggctggtttgccgggtggttcgggcaaaccaggaggcgttgtcggctaatccgacaaagcagacatacatccagtataaattaaatacgggaacgaacaacagccccacagcctgccctgctgaggggacgcgacgaccataccgggcaatgggctgtatgcatttccacgccctccatgtattgatcagcaacgaaatttgtgcatacaaaaagaataatattcctatacctataaccgttagggtaaaccgggcatcacctgcataggttgctgatgccactataatcagcaacggggacaaaagatacagcatggtcattgcccagaacgctttcatgttatacccctgcccagagggagtacttctttcatcctgcaatggaggattgctgtatgaagcgttttcttctaatggaggcgatgtcttgggcataggaggcatttccggcattaaatgagaattctcgtcatcttcgcctgagcaagaagaacgggatccttcccacctttcccctgtgatttcaggagaagcagcctgttgaaaattttttccgattaacgtttcaagcgcttcccatgaggattcgcccgtcttgcagcaaagaagggatccggccaagcggccgttgcgatacagggctttcatttgttctttggtgtaagggccttcagtttctccatccggcagcgcaatcagataagaggattcatcagcctccttccggggattgccctctaaaacttttaccgcaatgtctgaatatgtgccccattcagaagactgagtttcacgaatacgggtatcggaccgtatggggccctcttcatggagaacttgaagcacatgctcggaataggggccttgcagattcccggaatcgtcgcaaataaaatattttttcatctttgatttgaaaattgagttctgatatccgtgataccgttacaattttttgcgcaacctgcaaaaaattcctaaaggaaagacaatcaggagccccagaaaaatcaacgggagagccatcccggaaagtgagctggaattcgtgtcctctgaaacaggatctgtatcttttgaaatgccacgtctccgataaatatcttccgggcgatccatggaaccacccataatacgacttctcgcttcgataatgtccctggctcgttgcctgcatgccagagacaaataggggttataggtatcctttgaagcagctatcattttgtcaacctcttcctcccatgaataatctcccatttccatgacagaaggtaacgagggaaaggatctggccagactggggtggtaggctgttccctgcccagttttattcgaaagagcacggtaatgggccatgttgatcaggtattgacgcatggccgggtcgatgtagcccttgtcggcataagcctcttcggcagcccttacgatttcaacggggtccgtggatgtttgaatgatattcctgtacttctcatcaattccctccaaggctcgtgggtcaggagaacccaaggtgcgatatatcatcctgttggtgtcggtatcgctcatgtacttgacgggaggtgttgcaggtgccttgggcctgtccggaactgttagatgaaacagtgtggaaggcgcttttaccgcatccatgttctcttctgcttcttttcgtattttgggtaatgctttaatagcaagctcatcactttgggctgcggctttttccatccaaaacaatgcctgttttaaatctttttgtgttccttctcctttgtaatagagagaggctaatataaatgaatcgccttgaactcctgccgccgccgatcttgaaaaccacttgaaggcttttttatagaagactgaattactttcggcaagtcgatgataaaaccaggctgttcgtgattttaaaaaaggatgctcacacacggcgcgggatggtttgtattcacgattatccgacatgaattgatccacgacggatttccaggaatcatcatttattgtacctttaccgcgttcattcaccaatctgtttatttccggatcaaatgcttggcgtaacctattgatttcttccattttttcattaaactttccatctttgacagcctttaagataggcaaaaaatctttcttttccaccaggcatccattctccaaaaggatttcaactatgtccggcttttcaaacatgacggcacattgcaataatgaaaggtgatccctttccggatatttataattgatgtctcctttcccggaatgaacaatcttgtcaaacaaatcaacatcatccctcaaaatgcaattcagcatgagttcataataatctcctttggacagatcttccactctagcggccaggacttccgcgtccgccgaactgtttttcaacatggcgactaactgtctttcccgttcttcctcctgttcacgggcgatatgctcttttctcagacgctgttcttttctcgctcttgcttgctgaaatttttcttccttgttcttctcacgagctaactgttgttccctttcttcctgttcacgggcaatttcttcctgccgtctgtcctctttatccctgacttcctcaaaccggcttctgaaatctatctctccatgataggactcggctatcgccgcaacggcaagagccagactctccgcgtcctgaggaatggtcttatacaaggtgcaggccagagtatcgctttgcttcaacgcctggagaagttccctctttccactaataagagcatgttccgcgttcaggataatctctcttgcctgcttacgggcacgattggccatataggagttaggctctcccgtcaatggattcggcctcatgttattctccgcctggcgttcatattgttccgctttggccttggctccggcttgctgctgcaaggcctttttgtaagcagactgcgcggtaaaaagccgtttgatggattgaatgacctgctccgcctgattccgccctgcgggatccaaggactttttactctgctccaatcttttgacgactgtcctggccccctcgacactccctccgcttatttccttcaaggaaccgtccgcgtacggtatccggtttttttcttctcttccggcagacctggaatccgtcccaacagtatttttatctgcctcttttctcttctgttcttcttgcaagcatcgttggttcctcttctccctctgtgcggtctgctgttgctcataggttgatttttccatccagacgccattgacaaaacgctttccggaatcatagttgtcttggtattcctgcaatcgcttcagccatggatcgagaatagctgaagacttgggaaaacggtcacgaaacaccctcatttcatgtctttgtctgaggagatcttcatattgccaagagtcgaccaattccagcggaagggtattgggtatttctataaaccagtagcgacctccgggaagatagatatcttttccattgatatgaaaaattcccttattcccgttgaatcgttttcgactgtacgtactgacatgagcgagagaatcttcataaaaggtatgttgtttccaggctacaagtccggctccttcacacaagaaggtcgaaaaaactaataatccgacaatgtaaaagaaaatgcgcttcatgatgatggtggatggaggttatagttaagaactcttcaattttttacataaatctcttttgaataatttgtctttttctcgaaaatacttcgcctgggaatccgatattttaattcgggtatcttgaaagaattttttcttttcctgttcagaagcaggtaaggatggcttttctaatgtccgtttcaaacgtacttttattaacttatctctttcacgaaaatcccgtatatagggatcctgtaaaaacttttttctcatttgttcaaaagtctttggagaacaggcacaagataatatctgctctctttgggcattaatcgccatcatttcccctaatttcattgcgagaaatcccaaggatgtcccggccgaaaaataccatgacaccgcaccaaaccctcctaacaaagaagatcggccagcagtgcgcataacggagcttaccaaggattccttatgaacatttctattcaaaatataagaaattccacttcccagtagggctgctgttattgaatgactaaagaatgaagcaggatcaatgtagcaggtataagttttccatgccgaaataaaacctgccaggatgttttcggctccggctccaatcaataaaggattggacgtacttattcctgttagcaattctatactcccctctccaaaggtatcttgaaatatttccgcattcatgggaaggtcgccagagattgcggaaatcagatcctcatatccttcaagtccttcttttattcctccaattcctttgaacaggattccccccccgtctatcccgttcagcacgtccatgagattgattgatagatatttttggggaaatcctatgcttatcaaccattctcccagtccggactgagaacaaccgggaagaggaattcctgccttggtaggaaatccgtcaggagaatatgccccaggtcatgcatggctctgggaggatcacgaaaaaattcggggaggacatccatgaaaagatcgtgtcctcctttccatctatggttcccgccgctgataaaatctgctgtttcgcttttcgccagagagggaaactgcttatctactaaacaccgccattggtgcgatgggattgattcgtaaaattttcaaaaccagataatgttcttatgcaataattcttcatacagcaatgagcatagaaaggaagacgtaacaacatctgccataaaaatatcccggcaagttatttagttaagtttatgctgcgtctttcccagtacacggacaatccttgttctacacctttactcaaagccttgattgccttattcgacagagttggcgcatcgtcatgaaacataaaatatccggcaataacagaaagcgctaatccgccagtgatggcgattacagggatggtcacggatgtacctgcaaaaaagactgtcatagccgcaagaacgcctgagccccaccccagagcggcccctattcctagcacaatacaagtcacccctccagttccggaagcgagagaagcggcttgcttgatcaatttctttttttcttttttatccggcgccaatacagcttctgcaaaacaacaagccatttccacttcttgaggtatttctccaattgaatcgcaacaatacctctttattgttgagcagacttgcctcatgtcaagatagttcaaatatcgctgatcttcaggtttggtagaaaggatttctgatatttcatcacgaatgattatgtccatattgacggtaatttgatccaatgtcatagctgtaatgatggttggtatgttgatgaaagaattcggaattatgtagaataatcttgtcgtaacatatttcagaatattctattttcgtagtcatgttgctcctgtccctcgttttcaatgtgcggttcttctctgactacgaggagaaattagaatcggggggggatggcttacagtctttgcccgtttgtgcggacaatgcctttgcctccgcagtggaggcaggtggtgttgccgaacttgccgctgccgttgcaggcggggcaaactttgactccatctctttgtcggcatgcggtgtagtcgttggcagacggggaagcatccggggatgacagacttgcatgggctgccggaacacagaggaaagcggctatcaaagccatgagggagacgcaaaatgttttcattggtggagggcttttgggtgagaggttaaatgaggaatgaaacaggcggaacatgcggtttcttgttctttcgagccggacgcagcctctctgcttatcccgatgacaatctccagaagaacctgccgaagggaaaggttacgggaggccattcgtttcagaagatacaatctggcttcatcgcttagcttctcgattagctcggtgatatcgcactgcatattcgccatacggatattttttatatctatccaccccattttgtcaaatagtattatagctattatggaaaaatagatatttttcagagagctttgttatcactcattcaccttcttctaacgatggtttttccggcattcgcctcttgggaattgacgcgcaatagcggaaaagctagtatcacgaatatgagttcagattccaaaccgcagatggagttgaaagccgacgtcaagcgttggctcaaggctcgtgggctggactacaagtggttggctgagcaatgcttcgtcagtgaagtgaccgtctacaactggatggccaagaaaaagattccggaggtcaaggaacacatcatccgttccctgatgacggagatgcccgtgactcttccgtccgtgaaggtggaaacggagtcccgcgtgatccttcaactgccgccggatgtccaggcggctctggagcgcaaggccctcgacagcaagatgacgctgaccgattttctggcgacaaaaatcaatgagattgttcgcgaagggactcccgcctctccttccctggtcgatgaaatcgaacgcgaggaattttcgaaagacaaggattgattttttccgtactgccggggcatgatcgaatcattcatccgccatgcatgaagcccccgttttccttcctcccggtcaaaaagttggtccttacgccattgagcgcgtcctcggccacggggcgaacggtatcgcgtatctggcccatgacagaacgctggacagaaaggtcgtcctcaaggaacattatccccaggggctttgtcgcagagattcagagactcaccttctggttccgctgaacgaagaagtagctcatacctttaccgattctgttgaccagttcatcagagaagcccgcttgatcgcttctctggagcacccctccatcatcaggattcatcgggtattcagcctttcgcccaccacctgtttttatgtgatgcctcttcttgagggcggaaccctgcgggaggtcatccactcagacaaacgcattcctccacgcaccatcatctcatggcttcagactctggtttcggccctcgattgtctgaatcaacatcacatcgtccatctggatatcaagccgggcaatatcctctttaccgggaaaggccagcccgttctggccgatttcggcaccgcttctctgcgccctcctcatggcacagtcaatatcctggctcattccgcatactcggctccggaattgttcacggaaaacgccgtacccgacatccgggcggatcaatactccctggcagcgtgcttttatgaactgatgacctcctatccctggaacaccatgtccggaaaggtcggtgaagcacatgcgggagagttattggtatcactggcccaaaaagagaaatccctgagatgcgtaagctgtcttcttgttcaaaacctctccctgaagagggaggaacggtctctttctccagaagcgtggctgaccgggatgaatcatgcccttcgcagcgatcggaggcgaagactccggagcagaattgtgacaatagccgccgtgatgctcgtcacagggggaacgcttacctagggactttatgagacaggcgttttgacgcaagagatcaggaaaactcctgaagatcttcttgtcgaagaactgcttcaaaatccggaaatcgcggcattcaaccgggaatcccgggaatttcatgattattatagccgcatgttcctcaatctggccaacaagaaggaaacttccgtccggaagatgctggaaaccatcaacgccgccagaaacgctgaagatctggaacaaatcagacaggcatggcgcaagcagcaacagtttgacaacatgaccctgctggcggcggaacgcgtgtatgccatcaagggaaaaggtcttgcccagcaatataaacatctgacttcacccgcatggttccggagctggaagcagaatcatcccggttcctgttccgacgatgttctcccgccgtcatccccgcagctcctgccaaggatattcccccatcccctccacaatccttcctacatcagtgaaagccgcctccgcatcaacgccgcttccagcaacgtcactcacgctctggagaaaaaggcacaggaattcggtatttacaaaacctcttatccggacggaactccccgcaatccgaaaatttcagagaagacgggaatctcgaagtgactatgcagcctattttgaaaatcaagctcacacaatgagtaagcctctatacaaatgcttgaaatgcaacgaaaaataatttaaacttaagacgtttcatgcttcaggtaaactttaaaaatggggacacgtcgagggatgttttcaaacaacttcaaaatcagggagtaacgcgggtagatgcaatgtcgacttctttcagtctctcggcatttcagatgttgccccttgaaatacggcaagcttcatggaacctgcttctgcctgaaacagttctcaatgattgggaaatcttgaattcccaacaggatcggccctttttgaatcaattgacagttcctctctgggcgtctgaatgccttaaatggatagagaggccgagcaatcaaattcgattcagccaaaagccattgaccatgtcgatgtacatttaccatcatggagaagaggcaaattatggcattctgggaaattgtgctttaacgacagacggattgggactcactccggcaacgacactgggcagcactgcgcccatgtatggacctcaggtagaaatgttctccgctcaattcaaggattactggaacgccaacatagatacgaccatatctaactttcagcgccaactgcactttctggcagaccctcatcctcctacatggttctactacaaagcatgccatgcgttgctgcagtccacggaaaatccggacgattacattaaaccagaaaccggcatttacgattcttgtgtttggaataaactctattccttccaaagagacggagttcgcgccgttatagccaagctgatgaagcacaacggctgcatcctggctgacagtgtaggcttgggaaaaacattcgaagctctggcggtcatcaaatattttctcttaagaggagccaatgttctggttctctgcccaaaacgcttgagagacaactggagcatatttacagaattgggtgataaacgcaatgtgctcgtcaaggacaggttgaactacacgattttgcaccatacagacctcaaccggaagaatggccgcagcggcacagtagacctggctcatttcaattggggtatgtatgacctcgtcgttattgatgaatcgcacaatttccgcaaccgccccacccacatatcacagagtggttcaaggtacagtttgctgatgaagcaaatcatccaagccggtgtgcctaccaaggttcttatgttgtcggcaactcccgtcaacaaccgtgtggcggatttgaaaaatcagattgcttttatttccggagaccgggacgacgcatttgcccattatggcattccaagtattgagacaaccaccagaaatgcccagcagcgcttcgtccgatggcttgacctgccggaagaggaaagaacgacatcccgcctgctttccctgctgggacaggattatttccagcttctcgatatcttgacgattgcccgctcccgaaaacatatagaacgctattataaagatggcgacgactccatcggcggcttcccccaacgactggaacctgtcaacttctacccgaatattgcggacgagtctctgttccccaccatcaagaaagtcaataacgacattgtccgtctgcatatggctgcctataatcctctttcctatgttttgcccgaaaaactggacgagtacatggaacgctatactcagacgactatcaaaggagaattcaggcaaatagaccgcgactggagtgtttcaaatctcatacgagtcaatcttttgaaacgcatggaaagttccattgccgcgttccgctttactgtaaacaaacagttaaaaacatgccgcgatctgcttgacaagctggaacggcattctgaatcacaacttcagacagaatgttatgaagacgaggaagatgaagatttggaggataccattcaaagaggcactgtggaagtacgcctggaagatgtagatatgcggcgttggatttccgatctcgagcaagacatcgccgtcctttctgcattggcggaaaaagcggcgcgcgtaggagtccagcaggattgcaagctggtcgagctaaaaaagctcatcgaggctaaaatggaaacccctatcaatgaaggcaactataagctgattgtcttcactgcctttgccgatacggccgagtacctgtacaaggaactggctccctgggcaaaagaaacattcggcgtgtattccgccgtggtgacaggagccaggaaaaacacatccaatctggatggggtccgttcttctcaggacggcattctgtcccatttctccccccgctcgaaagaatgccctcttgaaatatcccagggacgggaaatagatattctcattgcgactgattgcatttcggaaggccagaatcttcaggattgcgattatctggtcaactacgatatccattggaaccccgtgcgcattattcaacgattcggacgtatcgatcgtctgggcagcgccaataagtgcattcagctgatcaatttctggcccacgcacaatctgaatgaatacattaatttggaaagccgggtgcgaggaagaatggttctcctggatattgccgcaaccggagatgaaaacatcattgccgcccgtggagaaaaacaggctcttgcctacagactcaaacagctggaacgcctccagaaagaagtcgtggatctggaagatgttgatggagggctttctattacggatttgagtatggagccttatcgggctgatttaacggcctttgacaaactgcatcccggtcttatcgaacaattgccctcctatttcatggccacacttgatgtatcgaatacggacattcaggccggagcctttttctgcctgcgctcccattccaatgctccggcatccgccgattatcccctggccccctattatcttgtccacgtagcagaagacggtacggttaatggagattacaagcatgtgaaagtctgtctggatctactgaaaaaaacggtatggggacatgaagaagtggcgctaccccatgtaagacaatttcacgccaaaacaaaaaatggtgccgacatgagccgttatacccgcctgctggcttcagccgtcaatgcggtaacgggaagggaaaacgaatccagggcggcaagtattttcacccctggaggcactgctctgggcaaaggcgcggccgccaagggtattgatgatttcgaagtgctcgccatgctggctctcacacgctcatgacccctgtacagttccatgaattcgactggctgcctgaggacgcgctgaacggacgcacttctctgcccaaaacaagcatgctggcaagcatgcccgccgggaaaggggatgtaacgctgattcataaaaatatacgttcggcatgggttctgtctcttcggccggataatgtggggattcctgcttataaaaatgaacagtgctcttataacgaactcctcgtcatccatgcagaattgtcggagaaagcgaattcttcgggcatcgtccggcttcaggagatgtttcatcgttccattccctatcccctgtttctgtggctggcacatggtcctgcgtattttttatctgccgtgcccctgcggcacaaccgcgcggaaaaaggcaaggaagtatgggaaacctccatcacaaaagtccgaagctttgaacttgtcccggcttttaaggcagccctgcatccttcgttttctcatacagcaaacttgcgcgatttgtacattcgctggatacgatccttgtacgggcttatgattcattcccttccgtggacagagctcatgggaaacccacagccattttttctccccgacactattgaagcgggggcccgggcctggggttctctttccacacttttcgaagaatggaagtctttgaattcccggctcaacaaggaacggcagcccaaccatcgcgtcacgctgggcaacaaacgctttgatgtaagggaacaaatactctcattagctgcatcattgccatttcgggctttccccgaatgattatcctgtgttagcgtaaggcaagagcacattatataccatgtcttacgagaaactcacatcttcctctcctgaagcccaatccgaatcacccgttgcggatcatgtgaatgccctcgcatcgcttttcccctctgtcgttcgggaagggaaagttgactttgacgccttgcgtcagatgttgggcgacgatgtggcgaaggacgacgaactctttggtttgcaatggaaaggcaaggctcaggcgcgccgggcggcgacaactccttctctggggacacttcgtccctgcaaagaagaaagcgttgactgggatacaaccaaaaacctgtatctggaaggggacaatctggaagtgctcaaacttctccgcaagtcatatgcgggaaaggtcaaaatgatttatattgatcctccttacaatacggggaaggaatttgtatatcccgacaattatcagaatggtattgaagagtacaaaaaattgacaggccaacagggaaggttcaaagctaatgcagaaacaagcgggcgatatcatacggattggttgaatatgatgtatcctcgcctggccttagctaaagatttattaagcgacaatggtgtaattttcatttcgatagatgatcacgaatcagctaatctcatagaattatgcaatgaaataattggagaagctaatttcattgctcaattaatatgggaaagagcttattctcctaaaaatgatgcaaaattcatttcaaacagtcatgactacgttttgatgtattcaaaaaaaattgatagatttgagttaggtagattagagagaacagatgaagccaatgctcgatattctaaccctgacaatgattcaagaggggcctggaaacctagtgatttatctgttaaaacatataacgcttcttgtgattatataatcaaaacaccttcaggtagagaagttgagcctccagcaggtcgctgctggaggctctctaaaaaagcttttttagagagcctccaagataatcgaatctggtttggagcaaacggtgatagcgtaccttgcttaaagagatttttagctgaattaaaatatgaaggaatggcaccaacttctatattgttttataaataagttgggcatactcaagaggcctcaaaagaagtagcaactttacttgacgctagtgttttcgatggaccaaaaccggtaagattactaaagagattattgaaattggcaaacacagataaaaattctattatttttgatttcttttcaggttcttcaactacagctcatgcggtcatgcaattgaattcggaagatggaggcaaaagacaatttataatggtgcaacttcctgaaccctgtgagaaaaaaaatgaaacattacgaactggttatgaaaccatatgtgatatagccaaagaacgcatccgccgtgcaggtaagaaaatcaaagaagaagccggactacaaggacaacatttggacataggattccgcgtctacaaactcgatagttccaaccttcgagtttggaatccggaagtcgatgatctggagttggcactcggttcccatgaaaagcatctgttgcctggacggactcaggaagacctgttgtatgagattcttctgaagcaaggtattgagttgacggaagatgcccgagtcagggactttgaaggaaagcacgtttacagtctggggcacggacaatattacgcctgtatggaaacggtgatttcctccgatcaaatagaatcccttgcgctggggattgtccagtggaaaaatgaggaatctccggacaatacccagtgtgccgtttttgtgatagacgaagcgttccggtcagatgccgacaaattgaatttcgccaaaatactggaacagcacggcattccttccgtcaaggcgctgtaattggaatcccgagcctcgttatgaacgtcaaattacattttgagtcccatctggactaccagcttgaggcgatagatgccgtctgcgatttgttccaggggcaagagagcacctcacaatcggcatttaccgtgtgcggcggcctttccctggaaccccaaatatgggattcctcccggggacagatgatccagcaagggcatctcagttccatagggcaggaagaagggattggcaaccgcctgtgcctggtggagagcgaactgctggacaacctccatcaggttcaggaaagaaatggacttccctcatcagagagcctcggagaactcgatttcaccgtagagatggaaacgggaacaggcaaaacatacgtgtatctgcgcaccatttttgagctgaacaagcgatatggctttaccaagttcgttatcgtcgtgccgtccattgcgatcaaagagggcgtatacaagtccattgatctgatgaaggagcacttccgcagcctctacagcggagcgccaatgcattactttctgtatgattcttccgatctggaaaatgtgcgcagttatgcgacctcctccaagattgaaatcatggtttgcaccattcaatccattaccgatattgcggatccttcctttagtgatacggcgaagaaaaaagggaaaaaagcccggagggttatccatgagcctaatgaaaaaacgggggggctgagtcccattacgttcatacgcgactgccgccccattgtcattattgatgagcctcaaaacataggggccgcgggtgaggaaagaggcatcaagagcctctcgcctctgtgtacattgcgctattcggcgacgcacaagcaataccatcaccctgtttactgtctgaatgccgtcgacgcctccgagcaaaaactggtcaagacgattgaagtggccgatgcatccttgaaaacgcaaagcgcttctccctacatgaagctgctgaaaacaggcgagtccaaggggggcctctatgcccagatggaactcatggagcgaaagaaaaatggcgactatgccccttcaactatcaaactgagaacaggggacatgctgtctctgcaaacggggctggatatgtatggctccgccatggtgcaaaacatctatgaagactgtgtagcaatatcaactctggacgaacctctttatattggttcttcggcaggagtcgactatcaggatgaccttctgagagccatgatcaaggcgacgatcatggaacatctggaaaaggaagtaagactgcgcccgctgggaatcaaggtcctcagcctgttcttcctggagcatgtagcggattacagttccgacggtatccacagggacggcttatgcgcccgtatttttgaagaagaatatgccagactgtccagattggcgaaatatgccagcctctatgatccacaccctccggaagcatcagctgttcacaacgggtacttctccatcaccaaacggaaaaagggggaaacatctgacaggtgggaagatactgcggataaaacagccgccggcagggaagcgtccgcccgtgcttatgaactcatcatgcgagataaggaacgtctgctcagcctggacgagccgctcaaatttattttttcccactcggccctgaaagaaggatgggacaaccccaatgtctttcaggtatgtgttctacgtgacatgcagagattgctgacgcgccgccaggctatcgggcgaggactgcgcatttgcgtgaatcagaagggagaacgcgttcgggatactggcattaaccggctgaccgtcatcggcaaagaggagtttaataagtttgccgcagccttacagaaagaatacgaacaggaaggcttgcaattcggcctggtcaccaaggaaaaactgggagccattacgtaccggaatagcgccggagagattgttcgtttagggcagactcaggcggagtccctgattgtttatttgaccgaatgcggattgattgactcccgcggcaaggcaacagatgagctcaggcagcagttgaaaaacgggactttttcagtgccggaggtctatgctgcggcgaaagacgccatcgaatcccgcctgacttctcttgcgaagtcgctccagatcaaaaatgccaacgaaccacaaaaggtaaaaacccggaaaaaagtactggatagtccccagtttacggagctttggaaccgcatccggcaaaagacgacctacagagtgaaatttgattctcatgctcttgtctcctacgtcgttccgattctggatgaagaattgtctcaggtacgggcacctctgattacattgaccaaaacggaagttatcgtaggagccggaggcataacgggtgcaaacgaaaaacagagggacatgggtgcggtagacacgtccagaacgcctgtccctgatttgctgacagaactgcaggaacgcacccaattaacccgccgcactctggtacagatactgacctctctggaaaacttgaaggcagtccgcgtcaatgcccggcagtttttgaatatattccagaaggtcatagacaaaggactttccaaatttttgatcgatggcgtttcctataaacctgtaaccatagggacgacctactgggctcaggagttactggataccgaaatacaaagttacgcctcggatgtgatcaaaacggcagaaacagacaaatgcctgactgattatatcgtgtgcgattccgaagtggaacgccgttttgtcgagaacgccgacgcatgtgaaaacgtaaaatgctatgtcaagctgcccggatggtttacgatccccacccctctgggttcatacaatccggactgggctctcgtctatgaaaaggatggtgaagaacacctctattttgtcgtggaaaccaaaggggtggattctttgtttgaactgtctgatgaaaagcagtctcggaagatcctttgcgggcgcaagcattttaatgaatgcctcgcgaacaatcccggcactccctgcccgccagccgaatttataggccccgtatcatcggtagctgcattgcaacaacagattgtacaatgattttcagaataaatagaggaagattcatcattccagcagcagcaaataccagacgatttgattccaactatgaaccttattgattccgtctatttacttctgcaagaatctgcgtctcccatgcgtcctaaagaacttgccgctgtactcatctagtggggaatgtggcaatctcaaggaaagactcccgacgctacagtcggagcgcgtatctatgaggatatcaaaaagcatggaaatcaatcccggttcatcaaggcggcagaagggctctttgcgcttaacccgaacgtgaaaatcgaattgtcggactcaggggaaaaggcaggaaaggcggttaaaaagaaacaaccggaaaagtcagcaggttcctattctttttcggactgtgcggaaaaagtcctccttcacttttccgggaatgcccccatgcactacagggatattaccagcaaagccctggagttggggtggctcaagacggaagggctgactcccgaggccagcatgtacgcgcaaatcctgacagaaatccagaggagggaaaagcaagggaaaatcccgcgcttcgaaaagttgggcaatggaatggttgggctgaccatctggaaatcaaccggtttggaacgtcacattgattcgttcaacgacaaacaaagaaaagtcctgatggaacggatgatgcaattaaatccgcaggactttgaggaattaatcactgctctgttgagtaaaatgggattttccgaagtgagcaggactccctacggcggagatggaggcgttgatgtgcgaggcattatgacggtacatgatgtcattcatatcaagttggcggtacaagccaaacgatggaaagccaatgttcagtctcctgtcgttcaacaacttcgcggcagtctgggaacggatggacgaggcttgatcgtgacgacttccagtttctccaaaggagccagggatgaagcaacccgctcctcttcccatactcctattgacttgattgatggagatcaactggtttctcttctcgtggaatacaatctgggagtcaaaaagaatcgctaccaacttctggaactgactccttccttcttctctgatgaggaagaaatgtagatgtgacagctaaaaaagaggagtcgattggactgcctcttgagcgccttcctcagacaattcgtcttggaaggcatatctcatcgtcgggcgatgagattgtaaatggcttgtaacaactgagcgaggatcatgggatcagcggggtggatgttgagaccagggatcttcctcttcttcctcataaaaggaaggaggatgagaaccattcctctgcttgttccggatgaactcgccaaccttgtccgaagcatagcccagcaggatgcgggtgagctcgaacaggatgattttaatcatgggcatggcgtttgtgagtgggtgacggcgtcgatgaggatttgctccaaagcctggacaatggcctcagcgccttttttgtacacaacgacggcgagcagtttcccattgtgatggagaaccgcccagtagcgcgtgctcttgtatttgacgatgtggtacatggttccggtatctggatggatgtttcttcaacaaaggtagaaccacagaagcagccctgccattatcaagccgaaggccagcacgattccccatttgaggagtgcgaacagccacgggaacaggaaccagcctgccacagtcacgagaagaaaggtcagcatacggatgtagagtgatgatggtcttcctgttcgatgactgtccgggaaccggttgatgcccgagtattcctgccggccagccggatgttgcccaggtaggcggcccacttcaacagggctattctcccgtcccaggtgggatgccaggtgcgggggaagacgaagggatcgtcttcctccgtttggcggatgagcagtccacggtgttccagcaggcgaatgatttgcctgacccgtccccgttcttccgggtggaaggaggcgatcagctcatcgctcgtttgtccggatacggattgtgtgaggatcaggacggcggcttgcgctcccgtcaatgagcaggatggattcatgagatgtttcctttcctgttatctttttttattacactcaggcgatcaggccgcagacggaatcgcacaggccgtgcagagcctggctccgtttggcagccacatgcgggttgacggccttgaactgctccgtgaaggcgttgaacaggctccagacggtgcggggccggaattcctcatgaagcggctctcgccagtacctgatgacttccggcagaacggtcggcgtgatggcccggcagtcgaccgcccggatcagaagatcatgagccgccttgtcggtcagtctctgtcttttgtaggcggcgatccgttcgtcttcgcggtggaattgctctcccagccttccgacggcgcgggaggtcatgaagcgcagatcccgcacggcgaacctcgtatgcttccgggagagtttcacttctccggtgaaggcaaggttgtcgcagacgaagacgcgcgttcccatgaccagggaggccgggaaggtcttgtcatgggaattgcgtatgccgacaatccacgagtagtcgtcggggccatcgtcaggacgcaggatttggagaactccgaaataccgctttccttcatggctgagggcatgggtggtttccccgatcccgaagccgtgggcggtgagctgggattccacttccttcagaaggaagtcgtggggaatcgggaaccacgattccgtacaggacggggtttccacacgggacagagttctcctgtcgatgacttcagccccgcaatggaggagaagccccttacggaatacagtcggaggaactactggagccgttgccggttccggcatgatgtttctccgctggaggtgagctgcctgtctggtatcttccaaaggcaggatgtgccgggctgtcgccggacaatgaggcaatgcgatgataggatacatattgatgatgaaatatgggttgaaacgaaaacacccgctcccctgcgaatgggaaacgggtgttgagggatgaagacagaagctaaatgcctgtcttcaagtctatataacgggcagccggcaagaattgctgcctaccgccaatcgtctgagtgaatggaaggatgtcgggactgttctcctgaacttgtccgatacttgtattgagcttgttcggaacttactcggtacggaattgctttcaaacctttccctgcaatctgttctctacaagtttcatttcatgatagggggcaaggaaatggcaggtaaatttcatcgaagggtattgtagcgcgttctgtaggagagcatgtaggctcgtttggccgggggagagaggaatgagcacttcactagggtctctacttcttctctggatttcatcaaatggtcgatgactgtcctaatgcgtttgtcctgcatccccagttgccgtccgaactcttcaaacaggttgagattcgtgtgcgtcgatgcgcctcgaaacaagccgccggacagggcgaaatcgctgtcctgaatgtgcaggcttgtgttgagcagatcgtacgcgggggacaaggtcatatctccctgaggagtttccagtacggaaaaattcttcaaatgcgcgtcgccgttcgaaaacagataattgaacaacaccagacggaagaagcgttccatttcaattttccacgcggggacgtaacgctggatgagctctcccatttccaggtaggagtaatcatatttgaagttggaaccgccctgggcggatgttttcccggccagtgaggcgaagtcttccttgcgtagtttaccgcccttctgagtaatgtcaaatcgccgggtgatataggctggttctccggtctgaaaaaagcatagtccgttgggagccgttgaaattccgaatagctgagcggcaatttgcatggtcacgtgttcgttggccggcatgtcggaagcccgggcgaggcgtgatgagatgggcttcagaagatgcgttccctgttctcccgacttggtcagacggattgttccctggtcaacaagaacagagagtttttcctgaacccctgagatggaaatatgctcgcggtttttcagaaactcttccggctctccatgaatatcgggggcgtcataaggaagaatcggagacacttttttaccgtcgaacagtttccgcaatccggccgggctgtaggaggtgaatccgggaaccagcgtcgaggggcaacggtcaatgttcatcgttggtataaggctgtactgttaatgctccaatcgtatcatcatgacctgttgcaaggagcagcccgaaatgatccttttcatccagatggaaatgacggcactgaatttccttgttgacgccttccgagagcatgttgaagaaaacgggaaatagatggggggaacggtactcttcggaggttttaggcattgtcaggctgatgggaggaagctcttctctcatcaggtaggaatccagataccggaatacatagctggaaggggattcttctgtcaacgttccggcagggatattccgcaacaatacaagggcgtttctcatgattcaggccctttcatcacatcggttcttttggggctcaacgacatttccagtcccagtacatcgaatagttccatcaggattctgaatgtcgggttggcctgcccaagttcgattttattgagcgtattgatccctatgccggaaagttcggacaaatccttcagggtaatgcccagtatccggcgtcgttctcgaatgtatgttccgatatcactcaaattcacaatacaatgtgaaatatcatgttttgaatgttctgtctactctgttttctggtaaaatcacaatatgatgtgatttttgggaaccgaagatatctactactgaacaagagcttgctttgaaaagaagtgttttggtgattagagccggaaaacttcccggctcaggaatttctggatacggcagataaaacaagactccgttgccggagccctccatggaaaggctccggcaacagggatatgcagatgtttaccgcatttcaggtgcagcaacctcctgaagtcgagcacagcttccgaaggaaggagccttgcgggatattcctcctgatttttctatcagttcgttgatcagggaagatgcctccagcttgttcaactgcgaggctcccttgccgaagcagagtacggccagatcatgaagtgcggaattgttgatcccgtttttacgtgccagcgataggataacctgcctctgtttttccgaacagctccacgccggttcttcggggtgagatgtctgaggattcgaagacggaggctcaggcagccgtgaaacctgacgcatggcaggaagcggagcaccggatatgcttcccgatccataggaggcatcagggacaaatccgacccgccggatctgggtatctacagcggactggagcgagctgtagagacgttctgcggcaaaatcgagttctgacgtatttccgatctccgtttcgatggagacttcaaactgatgggaggaataccccggcaggccgaggcgcttgctgtagttggcgatgagtttgatagccatgatgaattgatattattgatggttaatgataaaggcctctgcacgcaatgcatgtagaggccgggaaatggcggatacttgtcccgctcatcttcatataacaccatcgtcaccttaattgagggaggaagggggctgatgattccgatcaaatacctcatttatagcagaagctaggcttccgatgtaatcttgcggggggcggctccgccccccgctcgctggctctcttttttctttttcgctttcgctcaaagaaaaaagaatccgctcgacgacgcaagatttaacacggaagcacccttccgcctcaccttgagcacacccgttaaaggcgtgcccaaggtggccctcccttcaatttaagggagcatgatttgaattcgtttttaccaaggcatgatatcttccggcatgtcttttcacgtatccttttctctccattcttcgcatgaaattgaccgtttccacaccaaggtttcggatgggccatccctccggcataatgagagctttcaaggcttcctccttgattcggcttgctctcagctggagttcactatccagagcttcagaccataatcgcagcttacgatccatattaaggacggaaaaccaccatagggctatggaatcggcagaaggcaatggtttgcttaaactattcaccaagtcctctattcgtccccgtgaatgcttaatggcatgatcaatgaggcggcacaagtcatccaggctgctacacattcgtcttttgcattcgccttcaggaaaatccgcaacaagcgcgcctctattacatctgagctcaaatttgaagatgtcagctgtcttggcgtagcaaacaagttccatgccattacgcggatatccatggcaggacacgaggctttcctgatcgtcctttccgcaatcaatggcgcctgcccgctctccgtgtgttctaaatcgattctttttgaaatgcttctcaaaaaatggcttcatctgattaacgatgaatggagcattccctgcggaaagataatggtagcagacttccatgcctgcaagagtaacgcttactccgttgtcccaaatgctgcccacaggatatttttcttgttgggtttggaagtaagctcgcttgatgtcctcccattccatatcaatcacagcattcagcatctttttgaggttagcagtgcgttgtgcagcagtaatgggttctgctaaccagttagcagatttctgatcggcaatggcgggattgctaaaataaattcgagagaactgctcttgagccgtctgttgatcggcggttccatctatcatccagagatgatttcttagtgttctcagaaggtttactgagatatacatggttatgaggatactttcctctttctggctgacgacaagctccacatgggaaagaggtggggggacctcccttaacgaaggaaatggccagaagggtgcgaattgtccaggcaatgaacaatggttgacaggagtattccgaggcctaggccctccttgataaggggacggtaaatagagggtgagcttcctggtcgacaatttcagttcattctcccgggatgttttttggtgaacgttgtgcaacaggctcttccccaaagcatgatttgaaggattgccctccagatgtttgatgaacccatatagatcggttatgccatgcagagctgtcttgacggttagaacgattttgtcaggcagggctttttcttgagaaggaagtggacatccccaaaagaaggtatcccaagtgcatggggtgtgagaagggactgcttggaatggttgctcagtttggtatgtattttctagttcacagagagcctttgtcttgggcttccggatggatctgcatctccgaaccataccgaagagggatggatgacctcgctgtttcaaacgctgttccgttgcgtgaacgtctacaaagcgacttttcccgatactcaggacacatagaagcccctttttctccaagttgtagactgttctgcggcacgggatggcagaaggagggaacaaggaaggaaaaagggacaatttgacaagggttgttttccctaattcatattggaagcccttctgcagggcctgcgcttccaagcatgtcttcaatgccgacagatgtataaccctttcttcatttattcttttgcagggaagaattccttctttgatccatgaataaatgagtacccgggagggtgtagagcctaatgaaaaaatctcgttattatctacgaattctttgattcgacagcattgagattccgatatggaggatgcctgtgctgaccgcatcctttcggaatctactcagactgcgggtaatttaatcaactatcggacatggaatttcctctcctgactttcagtcacaagcaacttacaatgaatatgccaaatatcgagcacgtcccatatccgtagtacatgagaaacggatacagagaggacatggttcctgcatgccgacttttaaaaactcaatggttcattttccgaaaaatgaaatccatttttacgaagtcggaaaccagccgaatccccaacgagtcaaaagctgtgccaacttggtattggatgaacatttggatcctccttcctgcaacccggaagaaatggacaggattgaaaaagagtctttcttgcaggaggtgggaggcgcaaacaattgaagccatttttcacgtacatcccagcgagtgaaattcttaaatcctttttccgcacacagtgcgatgaaaacaagtttgagggcacgccagctattgactccatcgtgtttttctgccggcaggatcgtatccatggcaagaattctgtctgcttctttggctatttcggcggaggtgatatccaacgtccaacccaatgtgtctctggcgtccaatggagattcattttcaaaatcttcaacgggcgtttccaggaactttgcggcctttttcaaaggcaatgcccttaacatgccagcagctctacggagtttcagtatcaactgttcgcattcccggggtgttttaacgatggattgcgcatatacagcttcgcttctcaataccttctcatcatcaagagaacagtttgagtcgaacagagggtgtgattcgagtctaatactttcatcgcagtacaattcccaaggcaaggagtagtaaaggttcagatactcttccgaaaaacgtccgtattcatctactacaccagcatccttgatttttgaggtcaggagctgcctggggaaaagagcctgcctgtattgaaaggaagatgtgtggatctccatgcgaatgggggcatttggggaatacctccacgcacgcagatatcctcctttttctctgaggtcctttttaatttctttaagaagcgtttcttctctgtgattttttctcacagatacccccggatttgtttttgagtttgccaggatttctctccagctccttataagacgatctctggcggaagatacccgcttttgttttccctgtggcgtttcgatagagacagtctccgagtactcccaatattcggattggagggaaggtaaatgagctcgaccttgagtagtcatgattataggtggtttagattaagatgaggccttcctcaggcaagaagcaaaatggaagcttaatatttgattattatttatcaacgtattacgaataaaattcgatctattcctcggtagttcgatagttgtcaggaagttcggctatatgggtaaattccagagggatgcattcaaaacaagcatctcccatacaagtacctcaatactgccgtatcggtcaattcatgaccagctccggaattttctttccgggctcatcaccctcctggggaactatccatgcctggattgaagacagatgccttcctgtaaaacggataggtaagacgaactacatagatatgaaagctctgtctcaacgattggcacggcaagccctcggcaacgggttccgatacgttatggaagaaaccgagcttgtcaaattgtctcttttcccgaaaggaaccgatttgttcgacagttcctcctgcccctgtcgcagaaccgtctacaactgggaaaagaacggcatgctttgcatcctgtgccttggaagcagccggtttgtcgacctcagggcaacgagggagcgcttgcaaagggaacattcatcctctcattgacatagttgccgttgccccctttttaatcattcactcaaaaactttagagctcgaatttactctataggtagaatttactgacgcagtgaattttgaatatagagtaaatttatgttgtgcatacaaagcagatcaagtagaaaagtcctatggagtcaaggcaggaagcatcccttatttctacagaaaatgaattgcgtgaggcattcgcaaagcttcacgatacatgggactttccgcgactgtccattgagccaaccagagtggttcttgattttgaggaatatgatgatgccgggaggccgcaggaatacattgaactgccgacggtttacaggctgatgccgcctcaaaatctggattcctttagggatcaattactcgttcttccctgtattccagcggggccgttcgttaaaaaagccttggaagctcatgttgccgttgctgatcccaatggagcgttttattacaaaaaagggaaagtttattttggcaatactggaagccccttgaaacgatttcgattcaacaaaggcgccaaagacctgttctccggtaaaagcgaacgcattgtccgggctcttcttttcaatgtttccaaaaaatggagccaaaaggatttggccgaatcaacaagaacaagtacagccttggtgaataaagtcatcaaggggctggaagataggcaatttattgatcgtcatccttatcggcaagtttctcttcttcatgaacgggagttgttggacatatggcatgaaaagcgcgctcatcagagagttgtccggtattccattgtaggaatcggtattgccgaactggctgatatgttgctccagtgggcggagaagaacggagccagggtaggatttacacaatgggttggagcctggcaacgcgcctcttttacggaaccagtcatttgtagtgcctatgtgtctcgtattccggatttgtctgaattgtctccggggttggtgggaagaagagtggaacaagggggaaatctgctcttgttctattctgaagatcaggatgtcctgcgtcaactccaacgttcccgtcatgtcccgctggtttcggatgcgcaaatttatatcgatttgaagggacaggggctgaggagtgaagaagccctggaggcccttgaacaatgtccggatttttgcaggaatcatgaaatttaatcattataccagctacagcgaagttattacgaatcatgcgggaaaggtacttgcctccctgtggggagccttggaaaactatcgtcatggcatggttttaatagggggcctggtgcccaggttcatctgttccggcaatatgaataccactctcttgaggccggtgactcttgatgtggatttgggaatcagtgttgctgtagacggggacatgtcacctatcgattggaaattgagagcattggggtaccgggaagatcagaaggaaggaggacgttttatagcagatatagatggcattcgtatccctattgactttctcacagaacacgtccaccccaccagttcgatagaaatagccggaatcagagccagtaatttgctgggcgttaaacgggctatcgagtcctcccgcaaaatcatgtttgaagttccggatgaagagggggaagccatacaggttcctctgcgtgtttgtgaagcaggagctttcctgatgcttaagttgcgggcgtttcttcatcgccgccaacccaaggatgcctacgacctgtactacgtcatgcgttactacgatgggaaacatcaggatggctggaatattttccaacagtttgcattcgagaagaaatcgggcaatacggcaacacaggacgcacttcaatgtctggaaacctattttagcagggaagaagacgaaggtccctccaaagctgccgattttgtggggacacacgtttcttctgaaatggctctggaaattcgtcaaactctcgtgactgcggcagaggctttgttgcgttgttaatgaagcaattttcagtaaaagaggtatcggaaagagttcttgcgagtgatttcttcttatccactgtctgggaatatctggtttgtcaacctcagtacgacgagggagcgattacaaggggagcatttatcctctcattgacaaagttaccgttgaatattcttcacgttcgtcatcaattttagcgatttttgcacacttgtttcattttgagctgatttttcctgcaattctcgctaacttttctctattcgatcacatggcttcttttctgtccaaatagtttgagactgtccctgtcaatacacatacccttaagtctgcgcttaaggagtacaaggctcccatggtcaaaatatccctcctgcagagagaaggcgtcattctcaatcttcgccgggagatttacctgtgtcttcctgaagaaggggagggcacttattctcgtgaacttgtcgcgaaccatcttcttcattcctcctatgtttcttatgaaacggtattatccagggcaggagtgataccggaacgggtggctcttctcaagtcctcctgcatgaagcggagcaaggtgtttgacaatgcgacaggtcgttacgagtacacattcaggcgcccgaggcttattttccgattggcctgacccggcaaaagacggaagaagggtatttctacctgacagcgactcccgaaaaagctttgtgcgatttgattgtctcttcatccaatcttcacattcagtcgatgaagaccatgcggtcttatttgaatgagtacctgagagctgactgggacatgatcaccgggatggatatctccattatccgggcatgtgccgaaaagacgaacaagaaaaagaactaattgaattttctggaaaggacgatgtcatgcctttcatcaaagatcagaacacgcttaatatctggtcgacagagtacttcctgcaattagcggacatggtgaagttgtcctaggaaaatactcaacctcattcgaccaacaaaacccttcttgcattcgcttgatttactccatattcggaaatttactaatgcagtgaattctgaatatagagtaaatttccaatctcttaaaaagacataagagggcagattttacacctgcgaaaaggcattcaaaaagggcttgcttctgcacgtttggtagcctattggtagccgagaggagttaaaaaacgtttattattgataatcaatagtaatgcataggactaaggatctagtggtgataaaccgtaggggttcgagtcccctcccgagcaccatcctctttcataccgcaagttgctggtttccagctcttgcggttttcgtttgccgccggcgggaaaataagccgcaacacattttttatcaacaggggagggcatgcgctataaaaagaaaggcattttcccacttccggccccccccgaactcttacttgccggaaacaatccggacgtaatcagtaaaggattggcccttacggcatccgttaaaaaccctccgccatcagggccacggcttcttcacggctcggcatggaacggatggctcccttgcgtgtcgtcacaatggaagcggcggcattggcgaacaaaagcatgtccgccaactggccttccgtcaggttttccagcccggtttccagaatccggtccaggcagcatcccaaaaaggcgtctccggctcctgttgtgtcaatagtcttgacgttcaagtacgtaggctggtgaataagtttgctttcataggcagcccagcttccttttctgccccccgtcaccagaataaggcgcaaattgtcgaactccctctgcaaaatcctcaatccttcttccatggtggcgcagccggtgaggaagagaagttcctccatttctattttcatgacgctgcatgcgccgcatccgtagagcatttgttcccgggccagttccatatcaggccacaggggcggacggagattggggtcaaaagagatgagtgctccttttttccgcgcatggctgacggcatgccgggtagccctccgaacatcatcatgcgtcatggaaatcgtcccgaaatggaagacgcgcgcgtgctccaccaattcaagggccacttctcccgcagtcagcttcatatcggcgccgggattacggtaaaaggaaaattcacggtctccgtgttcgtcaatctgaacgaaagccaacgtcgtattgacttcccgggatgagacgagccctgaatctccgatgccttcttcctgaagcgtgcggcgaagcattttcccgaacatgtcgtggcccactttgccaataaaggaggttttgcgcccgagcctggacagcatggacaggacgttgcagggcgctccgcccggattggcctgataaacgggcagttcccggtcatttattccgcagggagtgaagtctatcagcaattctccgagagctacgacgtcatacatgcttttgcaaatgttgaaagtgaaccttccggcgaaatataaaccgggagagataaagaagcatagaacgcgacggccttgcgggaaaaggaaaaagagattcattccagtcatggcggaaaaggaatttccccttttatcccgccctgcagaaacctcgaaggttgatggagcatccggatgtgaacaagtatggcatatatccctaacgccctccactcaggaaatgcccatcaagatgagacggcaaaaacagtgctgcgcgaggcacgcgcggaacgcaggagagagtgtccccaacggggcaaatgcccccttacgggcatttatgggcgcgacttcttctgctccctcccattcctccgcaacaaacacgcattttcaaggcatttcaagcttctttaagagaattcaacccttttcaagcatgtgtgatggtcacagtattccgcatttttcttcatgattcccttcccatcctgtaatatgcgcccatgcaagaaaaaagcagcggctttcaatggcccgcacagtggacccccgatattctcgccacgttaatgttcgtggtgcagaaaggaaggattctcctgatacgcaaaaagaggggaatcggtgcgggcaaggtgaacggccccggcggaaagtttgaaccgggggaaacggccctgcaatgcgttttgcgggaagttcgggaagagcttcacattgatattgaggatgcccgggaaatgggcgtgctgaatttttcctttgcctgcggcaccattccggaaatccgctgccacgtgtttatggcgacgtcttttacaggcactcccacggaaacccccgaggcggagcccttctggtgtccggtggacgggattccctatgacctcatgtggcaggatgaccggttctggctgcccgccatgctggacgggaaacggtttgaggcgtttttcacgtttgagggggaccgaatgctggatttttccctgaaagcagaggattaaatcgccaagaaacccgaggttgcggcctcctccctttaagccggatggggaacgccgaacttttttattccgcccttccccccggaagcagcagattcagaaggagggggaaacagcaccgcccggcgctccagaaaagattccctgaaattcacctgaaggtggggggcaaagagggtgcatttgcccttgaagaccattctgaacagcagctaacgttgaagggccggcttccgaaaaaaatggaccttcccccttgtaccgggatacatcatattcatctccttccctccaggtatcctgaaacggatcataggaattgctccggacgccagcatcgcagagatttccccatggcgtccagaaaaaggaaagttctccctgccggaaaccagttccggcttgaggttcatgcgaagggctggaattcagccaaatccgcggctccgtaagaaaacggggggatggttgcataaccggaccggtaatggaggtttaagggagcaaatcagctccggcctttattttttccaagcgcatccgaatatccactggtgcatcaaatcccttttccgtaaacgggcgtgggcttttctttttgcccggtatccgggaaatgctgatttttccgatgttttgccttctttttcaggtaatgcgcggatgcctgcgcccttgccgcttttttactttgcacggggaaaggacggctcccgcctccgggcatcaggccgtattctttaagcttttcctcccgcctccgttgtgataatgatgcgggagcaaccgtgtgatccttgatcgttcacttgctgactatttcaattcatattccattattcaacatgtatacccccgaattcaaaaacatcctcacttccaccctggacggactgcgtgcggaaggactttacaaggaagaacgctttatcgcctcccagcagtactcccaagtgacgctgaaggacggacgctccgtcatcaacatgtgcgccaataattatctgggccttgctaataatccggaagtgatggaagccgccaagaaagccatcgaccagtggggtttcggcatggcgtccgtgcgttttatctgcggcacgcagacccttcaccgtcaattggaagaacgtcttacccaatttctcggcacggaagacacgattctgtttccctcctgctttgacgccaacggcgggctgtttgaaggcctcctgactgcagacgacgctattatttccgattccctgaaccacgcttccattattgacggcgtgcgcctctgcaaagccaagcgcttccgttatgccaacaacgacatggcagacctggaagccaagctccaggaagcggacgccgccggagcgcgcgtgaagttgatttccacggacggcgtcttttccatggacggcatcattgctcagctggacaagattcacgagctggcagccaagtacaatgccattgtccactttgacgactgccacgccacgggcttcctgggcgaaaagggccgcggcacgcatgaataccgcggcctgttcggccatatagacatcaccaccggcaccttgggcaaagcactgggaggcgcttccggcggctacgtctccggcccgaaggaagtagtggatatcctgcgccagaaggcgcgcccgtacctgttctccaacagcgtggccccggctatcgtagccgcttccatcaaagtgctggacctgttggaacagtccacggaagcgcgcgaccgcgtagaagccaataccaagtatttccgtgacgccatgacgggagccggattcaccatcggcggcaaggaccaccccatttccccggtcatgctgggggatgccgtcctgtcccagaaattctccgcccagcttctggacgaaggagtgtacgccgtcggcttcttctatcccgtcgttcccaagggacaggcccgcatccgcacgcagatttctgcggcccatacccgcaaacagctggacaaggcgattgaggccttctgcaaggtaggtaaaaacctgggcgttatttcctgattcccgcgctttccatggcttcggacgcatcacccatgcccggcggcaacctgccgacgctgcccgtcaagcgggtggtgcgtcccactccctccattccggaccatgaagttgtgcgccagatagggagcggcgcgtacggagaagtatggctggcaaaatccctgaccggggcgtggcgcgccgtcaaaatcgtatggagggaggattttgaagacgagcgctctttcaaccgggaatttgagggcattctccagtatgaacccatcgcccgcaaccatccggggctggtccatatcctgcatgtagggaggcatgaccaggattccccgttttattattacgtcatggaactgggcgacgacgcccgcaccggagttcatattacaccggacgaatatattccgcgcacgctccagacggacaagaagttttccggcaacaagcctcttcccctggattactgcctggaggtaggcagccagctggcccacgccctgctgtacctgcacagcaagaacctgacgcaccgggacatcaagccggcgaacgtcatctttgtcaacggacgccccaaactggcggacataggcctggtggcccatctggaccagcgcagctttgtagggacggagggattcatcccccccgacggccccggcacccggcgggcggacgtttacgcgctggccaaggttctgtatgaaatcagcacgggaaaggaccgcatggattttcccgaactcccggatgacttgccggaaggcaccgtgcgcaagaaatggcaggccttcaacaccatcatttgccaggcggcggaaccccgcattgaagaatgccccattgattccgcagaggagctggcggaaaaaatagacgtcctccggggatatgaagttccttcccgttttcgtcttcagaagaaaaagaaacgccgcaaactcagacgggctcttcagcttctggctgcagccgtcgccggagccctgactgcctactggggggctttatggctcaacaacagccagcatccgccggaggaacctgcctcggatattcatccggatatccaatcatccgctccggaagaagaatcccggaccggatacgtgctggtgaccagctccccggcgggagcgtccgtgtatgatgcggacggcaactatctggatgaaacgccctacggccccattgaactgccttccggctccccggtagcctataccatcaagaaatcggggtttgcggacaaggaagaggcgggaaccgtcaaaggagggtccacgctggccctgggcggtgtgctgaaggagtaccatccccctacggacagccagccctggaaggatacggagggtgttacgtacctgcccgcagaaacacgccatgtggcgcaaggcccccttaccgccgccctgttcaacaaatttctgagggaagaccgccagaaagggaatttccagatgaaaagggaacagacggaaccggggcatccggagaaggatgtggccctgctcacgcaggacggcatcacggcctacctggcatggctgaacaagaaatgcgaacgggaggggctgctgggcaaggaattttccatcaatgcggatccgcttccgcaggcttccggcagcacggaaaatcacaatgcctacgtcctgaacgtcacccgcgtgttccaggtgcccattaccgtcaccaccaacccgccaggagccagcgtctttttcaataacaggctcatcgggcgtacccccattgaagaatacgtcaaccaggttccctacgtcattgaaatcaaactgccggggcacgccaccatgcgccgcagggggctggatccgcaggatttatacctttccctgcagttagagccggacaagtccgtcgtctttggctcgccctggactaacagcctgggcatcaaattggttcctgtgggaggaaatgctctggtcatgacccacgaagtgcgcgtaaaggactttcaggaattcctgaaagctaccggaaggaaagctccggcccggcccggctttccccagggagaagaccacccggtggtgaacgtcagcaggcaggatgcacgcgccttcgccagatggcttaccagcaaggagcgggcactgggcttgattgatcagcacgactcctaccgtcttcccaaggatgaggaatggagttcctgggtgcgtctgacggatgaacagggagcctccccctatgaaaagacgctgcctcatgaaaactcccgggaagccttcccgtgggggtattcatggccgccgcctgataaaacgggaaattttgcggatcagtccgccctgatttacttgccgtcctcccgcgttatcgtaggatataacgacgggcagccatacacggctcccgtaaaaacctttccgcccaaccacctgggcctgtacgacctggaaggaaacgtcatggaatgggtagacgattcctatggggggccggaatctctccccatccgcaactacggcgtcgcccgcggaggcagctacctgtccttccgccccaaacagctcaccacttccatccgcactcccctgccggaaaatacgagggataacgcgctgggcttccgtcttatcctgtcttccgaacgccccgccattccaacagctccctgacgccgtatctgcggcagcgtttctcccccgctcttcccctccctgaaacacaccgccccccaagggagaaagccctgaggcttgagagagcttccggctctccgggaaaatgattgaaagggcctcccgttatgctaccattttcccgcatccttttcctgaatgaaaatcatcgccatcgccaaccagaaggggggagtgggaaaaaccactacggccatcaacatggccgccgccctggctctgctgaaaaagaaaatccttgtcattgacctggacccgcaggccaatgccaccagcggcatgggcattgacggaaaagacacgcccagcctgtatccggccctgctcggccagcttccggcggaagagtgcatcctgccttccggcaggaaacggctggatatcatcccctccaccatggacctggccggcgtggaaatagaattggcccgttccggcaaccatctgacccgcctccgggaaacgctcgcccccctgcgggagtcggacacctatgattactgcatcatggacacgccaccttccctgggcgttttaatgacctccgccctggccgcctgcgacgaagtgctgactcccctccaatgcgaatggttcggtttggaaggactggccaagattctgcacgtgacggcgcaaatctgcgccagcggcgtcaatccccgcattcggcatgaaggagtactgatgaccatgtatgacggccgcaccaatctttcccgccaggtcatcgaccaggtggaacggcatctgccccagatgctgtacaaaacggtcatcccccgctccatccggctgggggaggcccccagtttcggccacaccatttttgaacacgatccttccggagctgcggcggacgcctacctgaaagcagcccgggaattcatcaaacgccataaaccctgaacatttggagaaacaagcttcccggaatgccgcaaacctctgcgggaggaacaggcagaaagggcaccgcagaaaacttcctccttcattttgccttccgggtttgttgcgtccatttaacgtcaggaaaacctcttccataccgcccccccggagacgaaggaaaacaggcattccccttgacttgacttccgcggcatataagaatgctccagctccgtttcaggaacttttcccctcatgccagcagaagaaggccagccagacgaccagccccgggtgacagggcaagtcccgcctcccgctccgacgacaggcctggaacagattctgcccggacgtccgcccctgccccatgcggaagaaaaaggggcctttttcgtttaccagcgggagctggctcccggcacgcgcctggaacaatatgaaatcatccgcgtcctgggcagcggaggttttggcatcacatacctggcgaaggatctgttcctgaaccgcaacgtggttatcaaggaaaacttcccttcaagatactcctaccgggaccctctgaccgggcatatccggcccaataatgaacacgatctggaaaattacacctgggctctgaaaagttttctgagcgaggctcagacgctggcggagctcaacaaccccggcatcgtcagaatcctttccgtctttgaagccaacggcacggcctacttcgccatggagcatattaccggcctttccctggattatctgggggaaaaacttcacagcaccgggcaccggtatacggaagacgaactcaaggggctgctgacgcgcctgctccggattctggactatctccattcccggcacatttaccaccgggacatcaaacccggcaacatcctgctgacggaggaaggcacgcccgtgctgatcgacttcggagcggcacggcatgccctgaaacttcatgccgccaccgtcctgaccacccaggggtattcctccccggaacaggcgctgggcaaaacgaatatcggcccgtggagcgatctctattccgtaggggccactttttacgccctgcttacaggaaatcctccggaccgcgcggaagcgcgcctggcggaagatgaaatgcagccgctgcacagcgaccccgtgctcacccgctattactcacggcagttcctgctttccctggacaaggcgctggccccccagatcaattgccgctaccagactgccggcgaatggattcacgacatttgcgccatttccggggaagaatcctccgccactattcaagtcctcccggcagaccgccgccatgcccatccggaaggaatgccaactcccggcgccgggaaaaacatcggcagcagaaaggccgccaccggaacggactgtcttcattccgcctcacgcaggcagtccgcacgcgctcttcgccgcaaccgccacatgatgtccctgctggtaggaagcgcatgcaccatcctgctgggagcgggagcattttatctgctggattacatgaaaaaagcccctatgggcactaccatcaataccatcaaggaagccatccagcagcctgcggcaagctccagcgtgggagaaccggaaccgccgccacgagatctggcatccatccgcattccggaactcaaaataacggaagacgcggcactggaaccgcggtcgctgacggagttccgtttgcgccttgacgacaccatcctgacccgttccgggcttcctcccatcctgccggaaaaactgcgcatctcctgcatttatctccaaatcattcccccggcagcaaacggggaaaaactgtacctcaccatccgggattccaacggcgtcctggtggaccgctccatcaatgccgtcccctccttcacggtgccggggcaatccacctccaccttcttctttcccgcgctcccggaactgtccacggaccgcacctacacgtactcctttgaaaatgccgcccaccaggccgttcccatgcaaatggcatgtttcaaaaacgagacgaaacgcacggaggaagccttcccaaaaatccgtttcatcgctgctccccccgtaccggaaccggccctgctccatgacccggcctacaaaaatcttgtggcggcaatcgccgcgccctccccggagaacaaaaatattctcgaccaggcaaattccatgccgggtatgctgccggccctggagcaactttccaaagccggctacccgatagcccagcaggcactggggaaaaccctcatatctccggactgtcccgacggttccaggccggaagaaggcgtggaatggctttaccgttccgccacaggagggtgctatgaagccatgaaggagctgggcattctgctcatggacatcccctcctactttccccgccttccccagcagcctccccttgcctcccgggattacgcccaggcagcgcgtttcctgagaatggcggtccaataccgggaccaggaggccctgtacctgctttccctcatgtactcccagggctggggcgtacccgcctccccggaactttccagcctgatgatggaacgcctcaatggatcctcctactccacggacagcctgaatcccaacgcgcctatcgcggcgtactggcttccccttgccggagaaaaaaacaccattctgcgcttcactattccagggccgttcgccccgtcccagctcaagggcgttactctgcacaatacaagcctgaaggatgccttctccatcagtaaaatcaatattctccaacatgggcgcctcattctggacatcatttccccccaggaagtgctgcccggcaaaagctccgctcccataggcatatccatcccggaagggctgctggcggatacgaccctgcctctggaagtggaaattttgctgacccccggaaacagctgcggcgtggtggaaatgccccctccggtggaaaagaaaaactccggaattgaaatcaattaagcttcaccgcttttcaacgcgaaacaacaacaggggaaacggaaaacacccttgattcccgcctggggcatgctacaaaggataaatgaatgcccctgttttcctgcggcgcatgctccctatgctggccgcgttcctgatggtctcctgcggtgatcctaccgtctcctactggaaaaaggcggcggacatcaatacggaatactcggaaaaaagcgacgtactggtgcaacgcctcctgaaactgaaaaagaaccctacccttccgggcctggaagaaagcagcagggatgcggctgacctgttgcgggaaagggacgaagaactggcggacctgagcacgaaaaacgtggatcccgccgtgacggcctatgtggaagaagaccgcaagctttttgccagaggaatggaattggcggaacgctaccagcaatactttgaaaaatatcttaagggaggaccggattttactccggatccttcccgggccgtcgcccatataggccggggccggcaggaaatacgcaaaattctggcagaagcccgaaaactggaagaacgggctgaaatgctgagaaaagaaaaatcagctgagcttgagcaagaacttcctccgctgcactttcgccttccggagttgaaacaacttctatccagccgttagaaaacgcgtacgaaccatttgcatcaatgcggagtcaccgccagtctgacagcggcctttacactgcacgggcggacacaaccggctcctgaaactttccccgtccatgttacggaaatatcccttccctggatttacaggaaaaacgagtccccctgctgtccatcgtcgtttatttcagcattcaaatttcattccctgaataccccttagcacaggcttcatagtttaaaattccaaagaaggggtttgcctcccctccacaaaaaagccccgttcatatttcatgaacggggctatattaatttttcaaattcacctgggagtttgatcaatgacgataaaatcctttttccccacatactccctccgggcatccggatctccatatccgtcccggaaacgtacttccaattcgtatattttcccgctggccagaggttgtaaacaggtcagcagcaggtatgcatccttgacaggcacttcatgtttctctccggggtttagagtaataaagcgcataagattcgcgacacgctccatttgataggagggaagataccatgccgttggcctttttcccttctttccgtttccctgactccatatcttgatgatcatattcggcccgcgttccttgagaggatagaagtcgtcgaaaagacgcacagccttttctcccttattggcaaacaccagcttgaagtccggaaaaacggctcttggatcgaacgaagccttttccatcaccacggaacattcaatcccgttatcggccatatccccccatgcaggagcatggaagaacaggctggccaaaagccctaaaatttggaagattttctcattgcagcgcgagcttttgggagaaggcgagaattcgcgcttcatcgtcgagttcccttcgtacttcccttcctggataggttccctgtccatcgtgacgttgaacgcgaccgcattgccactagagggatcgtaagcgttattctcatactttaaagccaccttgtaataaaatgtctcactatctccagggcgattgatcgaccacggagaaatcttttcttcctacatacttcctccgaacaccggaatctccatatccgtcacgaaagattacttccaactcatatttctcaccattgcgaagacggcgtgaaggcccaaaatagtgcatcaacagatacgcatctttgatgagcacttcatgtctttctcccggcttcaacgtgatgaagttcaagaactgtcctcgctcaatgcaataatgagggtaatatgctgctaccttttcctttttctcttttgtcaatttccaaaaaatctctatggaaatatgcggaccgttatccttgagaggatagaagtcatcgaaaagacgcacggtcttttcgcccttgttcgtgaacaccagcttgaagtccgggaaggcagccctcgcgtcaaattcggttttttccatcaccacggagcattccactccgttgtcggccatgtccccccatgccgcggcatggagggacaggcttgccagaagtattaaataccggaagatttttttcattgcagcgtgagcctggccgttgcccggagaacccccaggaaacaatccttaccctgctgattatagtagcgcgtttcgagttcacaagaacattgtttccagccttccagatcgacttcatccagacacaccggaatcgtgacgctgtattcctgaccgggtgcaagctcccggtagttcaagggtcgctggaaggtcatagtgccaatttccctgttcagaacgcgcattttcccctgttgcgtcctcaacaccgtcacgaaaaagaaatcggacgtttcgtcgttgatttcgtccggaatccggacaggctcgtttccttcgttgcggaagcggactgtgattttgccttccgtgaattgggaagtatccgccatggagagggtcaagggcgccggttcctccgcaacagccatgctgcgggtttcaccttcgctgaccggaggcatgaaacagggaggctcgatcgttccaggtttcgtgataaacctgggcacattgttccaccccatcgcatcggccagacgaatgacataggcggttgcctcgttcagggcttcctgtccggcgcaatagggtctgtcattggcatcatccggcaacgccagtacataggctaatgtctccgtccaaagatccaatgccatttcattggcaagagcctgcatgaacttcacggctttatccatgttcggttctttgtcgcaggagatagtctgattttcaagcatttcctgtattttggagtccttccagtagaacttgtaggcatcctcccattgacggcggtggtgttcttcgtgggcgagggaagcctgcggcgtgtgccatgtgcccactcttccgcgggtctggtaaccgttcatttcgttgaccgcttcggtggcttcttctccattgagagggggatcaacatagggattcacgtaaatgccttcatacatagttagcttggctccggcagaaacggaaataacacgacacctccatacgttttccgattcatctttgcaaaccgttacgcaaatcttaggtctcaagctacttacattgcagccaccattcccttccaaatagacgggttccggtttctcaaattccagttccacttccttggatggctcacaggtgatagcggattccttctcaatcgtccacaatttgattttgggggacggcgagaattcgcgcttcatcgtcgagttgccttcatacttccctgcctgaatgggttccctgtccatcgtcacattgaacgcggcagcgttgttgctgacgggggtgtaggcgttgttggtccacgacagggccaccttgtaatagcccgctttcaggtacctggaatcggtttcaatattcagtttgccgttgggtggtgtcccatccttttttatagcttgctcaccggcaatcgtcaggctgcctgtgtcgtcggcttccacgccgaaataatacaggccgtcttcctcgaccttgatgaacatttccggcgctccgacacaggtggcataatccgagggagttccgtcaaagccatatatcatttcatcaacgccgagcatcttgctgataagaggctcatccccttgataaatgcagacgggattaactgccttgttgattggtatataattgttcattgctattgttgttgtttactttttggaaagactgaaccatcagccttccggtattctggcggcgttccctgaacccatcaacacgtttaacgcgtagtcccccctcattcggaacgaagaggaacgacctcccctctaattttacgtgctgccgtgaacttgcaaaaaaactcctggtgcgtttttatatcctgattcacgccattttggaacaaagttgctccatatagatctgacaacaggcacgggcggcattccgccgcacaatcatgatgccttaaaaaacaagcattctctccttctctgtccgttccgccaaagaaaaaggctgtttccagagagtccttcacttaaaaacaaagcatcttttccaaaaacgagattgacacccgcggttcttttccctagtatccgcgcacagcatcagcggcggggtagccaagtggtaaggcgacggtctgcaaaatcgttattcgcgggttcgattcccgctcccgcctccaagatgttgtcaaagccggttcaagtcgcgttcgtctagcggtccaggactcccgcctttcacgcgggcaacacgggttcgagtcccgtacgcgatgccagcttttcttttttccgacttgcaccggaatcttttttatgccatccccgcgggatgattctggattttttctcctgttgtggtacagtagcttccgtcatggcagcccagaacgatattatgctgaacggatccccgtacgaactggcggaaccctgttccgtctcccggcttctggaacttttgaacatgaaaggcaaacccgtcgtcgtggaacacaacggggccgcgctcctgccgcaggatttttcccgggtgacggtttctcccggcgaccgggtggaaattgtctccatcgtcgccggcggctagggttccgctttctggaacagtcttttccaatccgtcatcgccatgccatccatccacgtcatgtctcccacccttgccagccaagtggcggcaggagaagtagtggagcgccccgcctccgttgtgaaggaactggtggaaaacagcctggatgcaggagccaaattcgtacgggtggagatacgccgcggaggcgtgggcatgatcaaggtgacggacgacggcagcggcatgtcacgggcagacgccgagctgtgcaccaaacggcacgccaccagcaaactttcttccctggaggagctttttgaaatcacacacctgggattccgcggagaggctctgcccagcattgccagcgtttcccgcttcaaactctgtaccaggcagcagcaggatctggaaggctgggaaatacgcattgacggcggcctggaacacgaaccgagaagctcaggcgtctctcccggcaccgccattgaggtggccgacttgttttacaatactccagcgcgccgcaagttcctcaaatccgcagaaacggaagcttcccatgtggagcaccagatacgcctgcatgccctggcttatccccaagtacggtttgcctataaacgggacgaccagcttgtttttgaccttcccgccacagcggatctgcgcgtccgcatttccgcactgacggatgctgccacagcggcggccctgattccgatagaaacgaccatcggccccggtatttccatcacgggattcctgcttcctctttccgaagccagacgcaccagaaaagggcagtacgtctttatgaacacgcgccccgtggaggaccagctcattaacagggccattcgggacggctatggaggcttccccaccggactgcatccggcgctttttttgtatatggaggtggagcccgctctggtggacgtcaatgtgcaccccgccaagaaggaagtgagattccgccgttccgcagacgtggtaaataccattgtggaagccatagccaacactcttcaaaagcacgcccggcaggaaatccacgctgccgccgcgccggagccggagagaactcttcctcctgcccattctaccaccgcgccgtatggggaaatacccgcccgttccaccaaccccggttctgctttcccggcggccgccagaccggcccctgcttcttccgccgcccaaccgccgctttcctcctctgccagacaatcccatgggcctgtccctccccctaccctccgggccattcccttgaaacaggttcccgccacccaggggaaactggattttcaccgtcaggaggatgaagaaacggcacgaaacgcccatgaaaacgcagcttcagaaagggatgcctccgccggattttcctatctgggaacactccgccagcaattcgccctgtttgaaacgccggaaggcctggttctgatgcatcccaaggcggcccgggaacgcatcatatttgaacggctgcgcgcacgccgggaagcccccatgccgtcccagcagcttctggatccggtggtgctggatctggacccgcgggattttgccgtcatccggcagttcgccccgcattttgaccaggccggcatggtcgttacgccctttggacagaataccatcagaatagaatccatccccgcactgctggaactggaaaacgcacgcgcttttctcctggagctggtggaccgtctcacccagtccgaattcagccgaaatgccaaacgcgtggcttatgagaccttcattggggaatttgccagaaaatccgcctggagggagcgcatttcccctcaccgggcccctgccatcctaaaggatttgcttgcctgtgaagtgccgtactgcaccccggggggcaaacccacgctggtgaattattccgttccggaaattaaacgtaaattcggcctacaggcataagggaaccttgttttccagaaaacaggctgaaacgctgcaagattttacggcgaacggaaaatatgcagccaaagacggattgatgcccgcttctgcggtatattattttcccttaccgatactcagttttatttcagccgcagtaaggggcagaaactctccctggcaacagggatcattttatcctgtccggcttacggacaccttttccgtcttgtccgccagaactctggcatttggacgcatcctcccgcatacaacagggagcttgctcttggcaaggaagtttcccgcgtttatactgcagccttccagataaattcccaaccatgccagactctccccccagcacctcccccgctccgcgcattgctgaaactgccgccgggaaaattctggcgggcctgctggcccttttttacatcttcctggcaacgacggcggcaggcggggaatggcacacccttttccttcccgcctgctttctggcggcagccctcctgctgttctgcttctgtattctccggggatacaagattcccagccccggactgccgggctggctggccctgggtctgggaggcggctatttccttgtccgggcatggttttccccctggttttattatgagagcgtagcggatctgggccttatcgccacggccatcgtcatgttcgcggcgggaacgtatgccggagccggaaacggggaaaagagtattcttcccgtactggctgcggcattggggctgctgaatgccctgctgtgggggtatcagaacataacgggaacggaagcctcctggttcagaccggattattccctgttcggcacggaaatccgcaacatcggattgttcggatacaaaaatttttccgcccatttcctgtccgtcaccggttttttcctttgcgcatacagcatggcttccgccagaaaatggggcatccgcctattcacaggattggcgctcatcctcgtttccttcacgtgcggctcgcggtccgccttcccaaacgccctggctggcgtaaccctgtgcttctttatttatacctccagcgttttccgcaataacagaaaattttacacggcgtccatcctctttattatcctgcttttcctaggcacgtcctatgccgtgctggatttgtcccggggggcgggcaggcttaccgcccttctggatacattttccttcggcaaccggctggacctgtccaaactggcctgggcgctggcggaccaggctccgctgttcggtcacggcagccggatgtacaccaatctttccacggagtttttctccggagccaacctccccaattttgcccaccacgaatacgcacaagccgcctgcgactacggctatgccgggctggggctgatgctggctctgctggccctgtttcttatttccggactccggagcgttctgaaattgtcaggagaacatcaacggcccaatcccctgggaccggcggcgttctgcgtattgtgcatcgccgctttccacgcctatggggaattcatctggcataaccctgccttgcttggagccagcgccctatgcggcggcattacctgcacggcccctctttccagggtgaaggcttcgcgccgagtcggccgctggcttcaagcgaccgccgcactgctgatggccatattggctctgtgttatgcgtttctggcttttccggtctggaaaaactcccttcaagccgtcccggcttcctccagcaatcggctgcccatgctggaagcagccgcctcctgcagcctggacccggatttggtgcggcgcaacattctgcatgccgcaggcagttctccccccccaagcccagcccggctcaaagtattggagcatcaggaagaaaaagcggaacgcctgagccccgggaaccacggcctgacggcggctaaaagcctcctttacatcctccagggacgcctcacggaagcggaacagctgctccgcccgtacgtagagagtcccggcaggtttgacgaccgcatgttcgcctggactaccatttacaataatatgctgtattcctggagtacggccattgctgcccagtccccaggacgcgccctgtccatggccatgacggcccagcgcctgatgtccgcccaaacggaccggtggctgtattatggggccctggatcctgaagtcaggaaaaaacactactcgcgcctcaatgagctcaagatgctcatcatgatgctccaggcccgcagaacgacgcccgacccctcctggaggaaatagtattccggagaatcggggaaaaggaatctgtgcagcaaccgttatatcctttttccagagaagccgctccatacagaagtttccccgtcttatccggtttcttttttaccggattccacgtcagcttatttgtccacggaacacagagcgtactgcagccagaaagatgaaaagccgatagttggcgcagcaagtccgcacaggcgttacgccggaattttaagcggattcagctatcttccgccggaagcggcagcctctccggaacagaatcgtttgtttctttttcccccaatcgcggactgcctcggttggcggtcccgtaaaacgcatgtcccgacgcagctcaacagaaaaaaactttcccggctctattcctttatcgaatctttttgtatgaacataaccatcaaacgaatttatgaccccaaggaacccggggacggataccgcgtcctggtggaccggctctggccccgcggcatttccaaggaaaaagcttcctgggacgagtggctgaagaacatagctccatccacggcgctccgccagtggtttgctcatgatccagtcagatgggacgcattccgcaaaaagtacgacgaggaactggatggaaacggagaagccgtttcccatctgctccggctggcgcggaaagggaaggttacgctgctgtactccgccagaaatacggagcacaacgaagctgcggctctgagggattaccttttgcaacggtttgcttcataaatagaagcatattcctgcacaaactccatccgcaagccccaaatgctgtcacgggaacctatgatacggcaggatttcttctctcgttcatgaacaagcgaagaaaatggaaaggaggtgaatacaatatggccagcagttcccacatgggtggaagtcataagggcagttccaaaaaacgctccgagactaccacaagcaaaaccgggcggcgcatcaaacgcgatgcttcaaccgggcagtttatgagcgataaaagctcaggctccaaggaaaaacattaatgcccgcgagtttttcgcctgattcaggctccggatccggtccggagcctttttatttttctccgcatccggaacacgaggaagtcttccgccatccactcaggcccaattcttcaaaagcccgaaggcccagcgcttcaggggctttccggtctccgcgaatcacaacggcaaaaggctcttccctgcccggaacgtaatacgcagcccgcagaaccagttcctctccatccggatgggcgtaaacacccacgggcgtggaacagttcgcacccagacgtaccaggaaagcccgttccgccagcgcacaggcaaaagattccggatcattgatgccttccagcatttccgccgtctccctgtccgaggaacggcattccattccaacgatgccctgccccacagcaggaataaaaacttccaccggcaagggacgcatgtaaagttttcttccttccacaagggtttccggcgcgtacagccccaggcgttccaaaccggccctggccagaatcacggcatcccagccgggatgttccaccagctttcccaaacgcgtaggcacattcccccgcaggttttcaaaccgcaggccggacccccagtacgtgcgcgccatcaggcgtcggcgcacgcttccggtagccagcgttccggaaccgttccagtccggttctttcgtgataagcacatcctccacggcagcacggggcaagacggcggccagcgtgaagccggcggcaagctcgctcggcacatctttgaggctgtgcaccgctacgtcaatgcggccatcccggagggcggtctccagttccttaatgaagatccccttgtccaccatgccggaaacgcgggccacatccgccagaggaacatccgtgcggcggtccccaatagtatggatgatttcacagcgcacgtccagttccggataacggagggaaagggcagcacggaccatatccgcctgggccagggccagggcgctcccgcgggtgccgatgatgagggtatttttactggtcataaagagcggaatccggaaaatatctggagatgctgtcccggatgatggcctcgcaccgggaaacctcctgctctcggctgcgcttggcttcatccgccagctgggtgagggtatcaatatcgtagagatacacttcgtcaatatccgccacgtccggagaaatgttgcgcggcacggaaatatcaatcaaaaagagggagcggtatttacgggaggcacgcaaaggcagaagcgtttcccgggtgatgatgcagtggggagcagcggtggcggccaccaccacgtcaatatccctgagatagttcccccacacgtcataccggatggcctggccgccgatcatgcccgccagctctaccgcacggtcaaaggagcggttggccacataaatgccctcagcaccccgggcatgaagggcgcgccccgtaacgcggctcatctcgcccgcccccagaataaggacgcgggtgccggaaagatccccgaaaatttgttccgccagctctactgccacggatcccacggaggttgccccggcatgaatctggctttccgtccgcacttttttaccgatagtaaaggctttctgaaaggttttgttggcgcaggccgcagttactccggcatccagggccgtctggtaagccgtttttacctggccgaagatttccgtttcccccagcaccatggaatccaggccgctcagcacgcggcatagatggcctagagcatcttctccctgatggctgtaaaaataagaagccatatccagttccccgcgcccatcacccagaaaatgggataaaatgtgctcctgcgcattttccggagcgttggaccaataataaatttccatgcggttgcaggtggaaagcacaacgcactggtccactccaggaagggaacggatgcgctgtccttcctcccggagcttatgggacggcacggcaaaccgctcccgtatttccacgggagcggtccggtgattcaagcctaaacaaaccattctcatcagcttaccaggaaaatgctcatggatgcaataaagagggccacgcagcagcaggccaacatccttcccggaatgccgcggcggtaaatgaaccacagcaggacgctgtagcctgccgtgagaagaatgacaatggatgccttggccgcattaatggggagatgcccccgccatccgagccattccccaagcagaagaaggaggaatgccacaagaaccaggcgcttcatgctggcttccagtgtacggatgggaggaagcacacggcaggtgccgggaatccggtgtcttttaagacattcattctgcatgcagaacgccgcccccgcggcagcggccaggccgccggctccgtaggacatcatggctatgcccacatgcgccgtcacccagaagtcatgcgtgccctgcacgtccgctccggaacggcctatcagcagagaaaaaaccgtcagcacggcaatagccggagccgtaaagatgccaagcacggacattcggtaagcacgtcccagcatcagataaaagagattgatactccaggaaaggaagaagagcacctctgaagcgccgcggatgggacacattcccgtctggtacgctttgacgcatagcgcccctgtctggagaacaaagaggcacgccatccaaagatgggcatataaaaaccgccggccggaagccagcaggcgccatcccagccctgtgaaagccagagaaaggatgagagaggcaacggcccaccagttatcgttcataaatccggcgcggaaatggttcaggaacgcaaatcgcgctcaatgacggcatatgcctggtggttatggatggattcaaaattttccgcttccacccggtaccagctgaaggcggaatgactctgcgttttcaacgccacgttgcgcaccagatcttccacaaagacagggttttcataagctttttccgtcacccatttttcatccggccttttcaggacgctgaacagggagcagctcgcgcaggattccaccaggtcaatcaggtcttcaatccagacgggcctggaggcgaaacgcacggaataagtaaccagcccgcgctggttgtgggctccgtaggcactcatggccttggagcaggggcaaagtgtcgtcacgggaacgataactgtcagcttgaaatcagccagtttgttgttcgcttccgcctccatctcaaaccggacaacgtaatccatgagcccttcaattccagtcacaggagcgtttttggagcggaaaaacgggaattccatttccacatgggaacggcgggcggacagacggcggagcagttcccgcggaatggccagggccgtatgcacatccagcaaggggccatgctggtgcaacgcttccacaaaacggctcatatgggtgcccttgaattcttccggcagatccaccgccagagaaaccgtcgccacggtggactggatgcggttgagcttgtcctgtatctggatggggaagcgcaacccttttacgcccacccggtcaatggaaatattgcgcgtatccgcctcggactgggtatctttcagttcctgcatggaaaaagaggatgatgggtggaaataaaacgggagtctgccctgttaccggacaaactcccgcctgcaaagacaattctaccgaaagagattttccttggggcttgttacggcagaaggttgatggaacgggcccgcttgatttcacgggttatcttgcggtgcatcttggcggacagcccggtcacacggcggggaagaatcttgccggtttcagaggtgaacttggacagaaaatcagggttgagcagattgacctgatccatcgggatgtcgagacggcggcgcggcatctgacgattgcacgtgcggaaacgaatacggcgttctacagtcttgggttcagtggacataataataaagataatcgataagccgaaccagttaacgcatttcacgatgaagcgtgcggcgcttcaggaaaggattgtacttaatcttttccaggcggccgggagtacgcaggctttttttattgcgcgtggtgacgtagcgggacgtaggctttccttcggctttggcctcggtgcattcgaggatgatgatgtctcttggcatgatgaaaatgtgttacgggggaggatttatacactattcttcatcatcgtcaagagaaacagataaatctacatcattttgtcctccggcaaagcccagggccactctgggacggaacctggcattctggcctttttccttttcccactgggcctggcattccacggtaagccgcgcaaaggggatggcctccagacgcaggatgggaatgaccttgtatgacatttcgcagatgccatatgttccgttgtcaatgcgggcgagcgcctgttcgatttcatacaggccgtcctgctctttggaaagcaggctgagcgcaaaatcacggtcataggcgtcactgccggcatccgcctggtgctccccggagccggaagcctcactgccttccggatgattccggagagtatcgcgggccacgccgctcatgttgtccagagccctgtcgcgcaagtccagcagatgctggcgctgcatctgcacaaaaggctcccattcggggttggcggccagttcggccctggcggcggcaatggcttccgcctgttcatccgtcaattcatttttcgcgggagcgggaaccggggcaacaggagcgggagcggttttcttaaccggagcctttctggccgttttcggcgcaggcttcttttccatttcagccgcggcggcggcagcctctttggcgggcttggcggctttttccggttcagacgcctttttcctgcagcatttcttcttggcgggagcctccaggtctacagcggtcttgcaatcggacttcccgcaggtctttttcttggaagccggaacttccttggcgacggtcttgctattggttttcttgggagtaggcataggaggtgtctctatgggctgaggttgacaatatttcacgaacagagggcagaacccgccccgctgactagactatgagacattacaaacgcccaaatgttcattcaagaaaattcagtgatgaaacaagtcatttttcccccttttgcaccctctattttcctgtcgggattttaccgggaacatacttcttttaaccttttcaacgcccgataaaattctatattggcgttatatgacagcttcaaccattccctccatcggcattgacttcggaggcacctccatcaagatgggggtcgtcaagggcgcggaagtaatcgcccacgctccttcgatagccacccaggaatacggcaatcccgatcaactgattgaagccatagcccagttcgtgaatatgctgcggctgaatcacccggaagtgcaggccatcggcatgggaatgccggggttcgtcaatttttaccaggggaccgtttatacgcttaccaacgtgcccggctggaacaacgttccggtacgggacatgctccaggccgcctgcggactgcccgtatacgtggaaaacgacgccaactgcatggcttatgcggaatggaagctgggcgccggaaaaggaaaaagacatctggtctgcctgaccctcggcaccggcgttggcagcggcctgatcgtgaacggagaacttctgcgcgggtctacctgctccgccggggagctggggcaaacgagcatcgactaccgggggcgcctgggccattacggcaaccgcggctccctggaggattatgtaggcaaccgggaaatagctgcggatgcacgcacgctttacgccagccacggcattgacaaggccattgtggactgcaaccccatcgctttggaacgggccgcattggcgggtgatgaagtggctgaacaagtatggcgggacctggccgtaaaactctcctgcgccctgatgaattgctgctatctcctgaacccggaagccatcatcatcggcgggggcgtggccaaggccaaaaccctgcttttccagcccctgcaggaaatcatgaaagcccagctcgccgcccctctggtggaataccttgaaatccttcccgcccagttcggtacggaggcgggtatcctgggggccgcccatctggccctcaacacccacttcggagaaacattccgggcctgatctcgtgtcttcatcccaaatactcagactcgcccgcaaactggaattgacggcggaacaggaacgggattttctggacgccatgcaggccgggaaccgttccagaagcgcgctggtcattacaccgaaggctccggaaggctaccagccgcccctgccggcaaaaaacacgccgcaggagtgggggcattcctccattctggagctcccgccgggagagacagaaaccaaacccggctccctgccggattacgaatgcggctattactatccgctggatctctcgtccgtctgggaaacggcccctctggcgcatcttccgtttcgtccgggacgctgcctggacatgtgcgcggcgccgggaggaaaaagcattctggcgcaaacgcgggtatctccgcaggaacatgtttccaatgaggtgcatccgaagcgcctgggcattctgcgccacaacctgcttcgctgcggcttcaccaatctgtacacccagcgcctgcgcccggaccagtgggcggaactggcccccgggtgttttgacctcattctggtggatgccccgtgcagcgggcagtccctgctggctaaaggcattcccaaccccggctgtttcaattcctccgtcaccggaggcaacgccaagcggcagcggggcattttgctggccgccctccggtgtctggctcccggcggcttcctgctgtacactacatgcacctacgctccggaggaaaatgaacgcaatgtcctgtacctgctgaagcgccatccggacctgcacaccgtaaccgtgccggagctggagcatttccgttcctccctgacgcaggaagcctgctaccggctcatgcccttccacggagcaggagcgggcggtttcacctgtctgctgcgcaaggagggaggccatccgctcccactttccctgccggatgaattaaaggcatggcccattcatgccatgaattgctgaaaaaagatgaagataggcattttttccgacttgcacaaccgcacagaccatctggagccagccatgcaccggatgcgcctgctgggttgcggacatttcatcttcctgggcgactgcaccacgccggagagtttccggcgcctgattgaactgacggaggactttcctctggatgccgttccgggcaacaatgactatgatgtggaaaccatgcggcggatggccgacagttccccggaggcgcgcctgcatccggaacatgtccttatcacccggtacggcatgaaactttccctctcccattacccaaaatacgccttgcgggaagcgcgcagcggaaacgcagacgccgccctgtacggccatacccaccaggccgtgagcgaaagatgcggcggctgcctgctggccaatcccggagaactccagggcaggaccggacgcatcggcttcggcgtcctggatacggaaacccgcatcatcaacctgcataccctggattttcacgcatcatgaacacgctggacgtctgctgtgccctgattgaactgcccgccgcacgaggccctcttcttctgggcgctaaaaagaaaacggggcagtccaacgggcttctttacgaattccccggcggaaaagtggaaccaggggagaatgcccggcacgccgtcatacgggaaatacgggaagaactgggatgccccgtcttccccgtccgcatgctcacccccgtacggcaccgggagcctgaacgcattatccgccttatcccttttctgtgccgtctggaactttgcgccctgccccggcccctggaacatgaaaacctggggttcttctcccgccgtacgctggaagaactgccctgggcgcctgcggaccgccttgtgttaaaggaatggctggaagaacaccgctgaaagcagcatccctttcaaactcaatcgctccacgggaaagttcccgtccatgtctgaaaagattgcaaaaacaccttggaacattccctcccatgaggtatacaaggtggtggctgctgcactcgtcatcacctggcaaagtggcccggaccgatattacaacctaatgggggcagccccgacgcagggctgactacgtcctataccggaaaagtcaaaacagcggcggaagtccccgctctattgaggcacgggaacgtggctcacagccagagacggtgcagcggtgtcttttttccatcacctgaatccagaaagctcgttctttcaacgtttttctcctccttgaatccgcaggtaagccgggattcccctcttgggcaacattactcctgtcgggattcaccgcctttccctgttcttcccacccccgcatcacttacaaacacggagaagccaattccccaaaagatcgaatgggagcattttcagatatttcgtggccctccattcccgctccttccgtcactgggcgaaaaggaagaaaggaaatattattagttaataaacagcaactgttaataaacataataatcccttagacatttccggaaatcatgataggatcacgctccgttgcggaaaagtttttaacatccgtgcaactttttcattattgcgaagtataatatagtcgtgaagggattcatcaaactcatcatcgtcattgccgttctcggaggcatctggtttgcctgggaacagtggaaaggaaatgaagccatccaggtggactaccagacagaacctcttgaaaaaggagacctgatgatcaccatcgaagcaaccggcgtcacggagcctgatgaactggtagatgtaggcgcccaggtcagcggaatcatcatggagttcggcaaggacctgaacggcaaggtggtggattattccagccctgtaaaagccggtcagatgctcgcggaaatcgacaagcttcccgtgcagctggacgttcagagggaggaagcctccaaggcacaggccattgccggaatcgcccgcgccaaggcggacatccagcaggccaaagccaagcatcagcaggccagactggaccgggaacgcgcggaaaagctggggccgggggatgccctgtccaaatccagctacgaccagtatattgcggatgaagaaaccgcccgcgccaacgtagccgtggcggaagcctccctgcaggaagcggaagcctccctgaaacaggcggaagccgcgctgaaaaaggaaatgcgcaacctggaatacaccaccatcaagtcccccgtggacggcgtcgtggtcaaacgcctggtcaacataggccaaacagtggtttccagcatgagcgcctccagcctgttttacatcgccacagacctttccaagctgaaaatttgggccgctgtgaacgaggcggacatcggcagcatccgcaaggggcaggaggtactgttcaccgtggacgctttcgccggccgcaaattcaagggaacggtggacaagatacggctggacgcaaccatgacgtccaatgtggtcacttacatcgtggacattgatgtacccaatccggacaagcttcttatcccctatctgacggcaaatgtccaattcgtggtggaagacatacgaaacgctttcctcgtttccaatgcggccctccgcttccgcccggaaacagaactggtcagcgctgaacaaaaagcggcctttgaccggatgcagccggagctggccgcccccgtccgggacggacaaaagaaaaaagccgtggtttgggaattgcggaacaatcttctttatccccatctggtcaccaaaggggaaagcaacggcatgctgacggccattgcgggagaaacgctccgggaaggaatggaaatcgtctctacggctcagatactgaaccgctccgacagttcgggggacggttcttccgcctccgccggcggggaaaacccgttcgcgcccaaaatgcccccgcgccgcaagccgagcacaggcaacacgaaaacggcagcctcggctggcaatgacgggccgcccccgcctccctaacccggggaaccgccttcatccgaccgctcaatcactcttttttaccgcatcaagcattccaacaacgtgatccgcttacgtgacataaccaaggtgtaccacttgggagaaatagaccttcaagtactcaagggcatcaccctggatatcaatgaaggggaattcgtctccctcacgggggcatccggctcaggaaaatcaaccctgatgaatatcctgggctgtctggaccgccctacctcaggccattactatattgccggggaagacgttgccaaattcaacgccgcagaacgcgccactctccggaacaagcgcatcggattcgtcttccagaactttaacctgctttcccgtaccacagccctggaaaacgtgatgatgcctgccgtatatgcccaccctgccctcagcatgaaagccatgcgcgaacgttccgtggaattgctgaatttggtaggcctttccgaccgcatggaccacaccccggcccagctttccggcggacagcagcagcgcgtagccattgcccgttccctcatcaacaaccccagcatcctgctggcggacgaaccaacgggaaacctggactccactacctccaaggaagtgctgcacatgttcaaggacctgaaccgccaacagggaatcacagtcatcctggtgacgcacgacccaaaaatagccgccttcacggatagggccatcaacatggcggacggtcttatctgcgaagggatttccgatatgcttagcaaggacgacgtatgaaattccttcctctccttaaaacctgcatcagggccctggtgcgtaatcccatgcgcgcagccctcaccatcctgggcatcatcatcggcattgccgcagtaatcgccatggtggaaatcggccagggatctacgctccagattaaaaataccatcgcttccatgggggcggacacgctgaatatccgccctggagccatctccaaaagcggcgtcaataccggcgcgggcggacgggcctccctgaccaacgcggactgcgaagccattgcgaaagactgccccatggttctgcgggctacccccgtggtgcgcgccagcggccaagtcatttacggcaacaagaactggagcccggaaactgtagagggcggttccgtggaatacctgaaaatcaaaagctggtatgacatggcgcgaggccagcccttctccgaggaagatgtggaacaggccaggcgcgtgtgcgtcatcggccagacggtggccaaggaacttttcggggacgaagacccgctgggcaaggatatccgcatcaagaatgtcatgttcaaagtcatcggcatccttcagaaaaaaggggccaacatgatgggacgcgaccaggacgactccatcatcctcccgtggacaagcatccgctaccgcctccagggcctgggcggcggttccaccaccacttccaccggcaacagcaccaccaccttcaaccgggcagataaatacactgccagttccgtggattactacacggaaactacggaccagccctatacggacgcgccccatccgcggcgcttcaacaatattgattccatcatggctcagatttcagacccggaacgttcctccgaggccattgagcagattacggaagtgatccgcgccaaacacaacctcaaggacggccagctggacgatttccgggtatgggacatggcggaaatgtcccgcgccatgagcagcaccacggaagtgatgaccaatctgctgatgatcgtggccatgatctctctggtcgtcggcggcgtcggcatcatgaatatcatgctcgtttccgtcacggaacgaaccaaggaaattggcctgcgcatggcggtgggcgcccgtccgcaggatattatgcgccagttcctgctggaagcggtgctgctctgcgtggtgggcggcgcgctgggcatcatgctcggcaaggcgatctccatcatcgtcagccgcaccatgaactgggccacggcctcctccccggaagccatggctctggctgtaggcgtctccgtattcatcggcctggccttcggatggtacccctcctggaaggcgtccaagatggaccccattgatgcccttcgccacgaataacaccttactttttatttttccatgtcatccacgttcaaacatctcccccttctggccgcctgtttccttggctcctgcatggtaggccctgatttccggacgccgaccaatgacctccccgccacgtgggaggcgaacaggcccccccacagttcggacaaagatttgcgttcctggtggaatatctttggagacccccagctcaaccgcctggtctccacctccctcaacaacaatccggacatgaaggtggctttgctccgcatccgggaggccagggaaaagctccgcgtctcccaggcatccctgcttccctccgcagacgccagcgccgggtggagcctgtccccggacagaggttttcgcagctccacttcccagaacttctccctgggagcgtccacctcctgggagctggacctctttggcggcaaccggcgttccattgaggcctcccgcgcctccctcatgtccacagaagcttccgcaggggccgtgcgcacagccctgctggcggacgtcgccacggcctactttgactggattaccgcctgcgaacagctccgcatcgccagggaacaactggaaatccaacgcagcaccctcaccattgcggaaaaacgctacaaaacggaattcgccccccgtctggatgtggagcaggccacctccaccgtcgcctccacggaaagccgcatcccgcaactggaagcacaggtggcctcctctaaaaaccagctcgccgtgctgctgggaacatataattcccgtgtagaactgacgctgcccaaagcttccgtctttgagaaaacgcccaccgttccggtaggcctcccctccgaactcctgcggcgcaggcccgacgttatcgccgctgaggcggacctgcacgcggccgtggccaacgtgggcgtagccgtagcggatctgtacccgcgcttcagcctgacgggttccctttccagccgcggcggagatttcggccagctcttcagggaaaacaacaacgcttggtccctgggagggaatctgctccagcccctgttccggggcggagccctgagagccacggtacgcgcccagaaagccgcagcagaacaagctgcggaaacttaccgcaaaacgctcattaccgccgtctccgaggtggaggacgccctgatcgcctatggcagctatacctcccagatgcaatacctgcacaaggaaaacaacgccaacagagaagcgttccagctctcccgcaccctgtacatcaacggcgagacggacttcctgaacgtgatcaccgcccagcgttcctggctcagctcggaggaatccctggtcaccatgaagcagaacatccgcaaggccgtggtgcagctcgcgcgcgccctgggcggagggtggtaaccagccgctccctccaaaggccggggtcgccatccccggcaaacggaaccctgatttttcaacaggggacacggcagcaagggaatgactgaagaatcattctttgtaccccccacgttcagattaaaaaaggccgcaagaataggaacgaataaactatccggaaacttccgatggaattgaacagatagccggggctcaggttaagaacactctccagccacttctttcatgactgcgctgataaggttccgggtcttcacgccgggcagcacgttcaagtccatgcggttcatcgcatagccgaaggaaaggccgtgggccggatccgcaaaggcatgggaaccgcccgccccggcatgaccgaagccgccggagccgaacagatggcgcagcttgcggcccgtggcggggtctgcgggatcgtgcatgaagccgcaggaaaaggcggtgggcgttttcagcgtcaggtccggcccgtcaatgacgacgttccgcatccagccgcgcacgtcggacgggaatatccggagttcatccagccccaggcaggcctggtagaactgcgccatgccgcgggcggaagccacgccgccgaaggccggaactccggacacccacgcttccggcgtattcatctgccgcacactgttcagccctatcagagtattgaacgcacggtttacgggcgtgcccttgttcatgtattccagataaaacggcgtacccatgttggacatgtccatcttgccgggatacagcgtcgccacgcggttccattcggattccggcaacccgatgtaaaaatccagattcaacggtttgcggatgtattcctcccagtagcgccacaggcgttccccggtcagccgcagcatgagttcatcaagcatcactccgtaagtatgcggatggtaaccgtgttccggcggctgccacgccggaacggtttcctccagggcgcgcacgcaatcctcatggtcaaacacgcttgccgtccgggagaaagccgccaaaccgcattgatgggacatcatctgcgcgatggatgcatagggcagcgggaattcaggccacagttcccccatgctcatctgcggcgaggctccctgctggtgcagggccagcagaagggcggcggatgcggctcccttggtggcggagtaaacgggcaccagcgaatgttccgtccatggacgcgttttatccgctgcggcaaacccggaatgcagggaaacgatttcccttccttccttccagacagaaacggaggcgcccaattctccgtagttacggaagttttcctgaaaagcttcagttatctgccggtactcattcattcccttaaaatgacccggcgttactcccggcgtccggacaggaaaatactcccctccggctccgaaagcaagctccggcgctgccctggatggtcagcgccggaacaggacaatctgtaaaacatcagtctttcgtatgggcggccaggtatttcctggctcctacttcatccggatcctccttcagatcattcagggagaatttaatacggaataatctcatgatgaacacataagaacatggaatcagaaaagcgcccaccagtgtagccacccccatgccaatcaccaccaccgtaccgatcgcgttgcgcgccagagctccggaaccggaggaaagcatcagggggatgcatcccagaacgaatgccagagaagtcatcagaatgggacgcaggcgcagacgcgcggcagccagcgtagcctccatcaggcccttgccgcgctgcatctccagattggcgaattccacgatgaggatggcgttcttggccgccagacccaccagcatcaccagaccgatctgcgcgtagagcgtcagctccatgccctgccagaacaacccggcataggcccccagcacggcaatgggaaccgtgaggaaaaccgccaggggaagagaccatttctcataaagcgccaccaggataaggaaggcgaaaacggcggacatggtgaagatggcccccagcccaatactgttgcgcaccttattttcctggaagctcatgtcctggtagtcgaagccaaccttcgtaggatccatcgtctgatggaacacttcctccagcgcatccatcacctgctgggtggagtggccgggccggggcatcacgttcaatttggcggcgttgtagatgttatggtgcatcacgaattccgtatcctctatctctctgatgttcaccagggcggagagaggcacgcgggctccgtccgcgttcgtgacaaagaagccgtccatcttctccaggctggcgcggtcttcgccctgcgcctggatatacacctgccactgctggccgaaggcattgaagtaattgatgaaggaggaaccgttgtaggaggccagaatgccgttggccacgtcaatatccaccttgtggaatttgcatttttccttgtccaggttcacgtacttctgcggcatgtccgccatcatcatgtctatgcacaaggctatttccggacgccgggaagccgcttcctggaaccgttgcacctgttcatgcagataagctacgccctgcccttccagatcctccagtaccatcgtaaccccgttggcggttcccacgccggggatggcgggaggttccagcaccatcgccatgccgtccaggccggcctgggccagctttccctgaagctttccggccagctccgcggaggtttccggccgttcgctccagtccttgagctcaatgtaggcaatgcaggcgccgggagtctgcacgctgttgaggatgttgagccccaccacggtagtaaggttcttcacggcgggatcctggagggccgcctcaaattttttgtcctgttcataggcaacctgcagggaggtattcggcttcaggatcaggcaggccagcagaaagccctggtcttcatccggaagaaagccgccgggaacgcgctccgccacaggagctaccgccccccagaataacaacaggagggggatggaaatcgccagcttgcgggccaggcttccgcacatgcgggtatagccgttggagacacgtccgtaacaccggttgaacaaacggtgaaatggggaaaagaggctcttcctgcccgcattccggggtttcagcaacagggcgcacaaggcaggggaaagcgtcagcgcattaaaggcggaaatgagcatggaaatggcgatggtcacggcgaactgcttgaacagcgttcccgtgatgccctccagcagcagggaaggcaggaacaccgccgccagtaccagggcaatggcaatgacggggccggatacctcctgcatggcggcgaaggaagccatgcgcggattgagccccttgtctatgtgctcctgcacggcttccaccaccacaatggcgtcatccacaaccaggccgatggccagcaccatgccaagaagggaaatggtgttcagagaaaaccccaggacgggaaagaggcagaacgtggaaataagggaaaccggaacggcgatgagcggaatgagggtggcgcgccagttttgaaggaaaacatacacgaccagggccaccaggatgacggcttccatgaacgtgtgcttgatttcatcaatggaatagcgcaccgccgtagtcgtatccagggaaacgcgcccggtaattccttccggcatcagcggagccttggcttccagcagtttttccacgcggtccgccgtagcgatggcgttggaacccggagactggaagataacgatagccgcggaaacttctccgttcaggcggccggtggcggaatagtcttcagctcccagttccaccttggcaatatctttcaggtacaggatttcatccccattctggcgaatgatgatgtcttcaaattcatggggctccgaaagacgcccctgagtgcgcacggtaatggtctgctcctggccgtccggcacggggtccgccccaatcttgccgccggggttggtggtgttctgggcggagatggcgccccgcacttcattgacggaaacgccgtaatgggtcattttggacgtatccagccagatgcggatggcataacgccccgcgccgtacacctgaacttcccccacgccctccacgcgcttgagttcatccaccagcttcacctgggcatagttcgccaaatccacggaattataactgccgtccggggatgtcagggaataaatcatcagcggaagccccggctgctgcttgatggtcacgcccgtgctctgaacttcctgcggaagctgggaggaggcctgcccatagcgcatattggtcagcacctggtcaatatccgtatcggaacccggttcaaaaatgacggaaaggttatacacgccgttgttggaggaaacggacgtcatgtagtccatgccctgcacgccggaaatctggcgttccaggggagtgcccacggaatccgccaccgcctgcgcgctggccccaggaaacatggcctgaagctggatggtgcgcggcgtgatttccggatactgggaaataggcaggttgaacatgcagaccagccccagcagcgtggtcacaatggcaatcacggctgcgattgcgggatgcttgatgaaaaacgcactcatggcttatttggcagttacggaaggagtggtggaaacaggggcggtatagatgaagggaacggggacaaccgtcccgaacccttccgtggctccatgttcccgcatcaggctgttcgccttggaatactgggcggccatcattccgccttccacgatgacgggagcatccgccggctttccgtatcctatttccttcagagattccggaatgggcttgaccgttcccgtcactatctgcatcagcatgggggccgttccgcccttgccgtcaggcatgtcaagaactacggtttcccccggctgcacgtcaatgcggcgcggcatcccgtccggagccaccaccatgatgttgcggtggttcatggaagaaagcagggcgcgggcgggaaccagcaaggcatccttctccgtacccgtcacggcgcgcacgcgcaccgccattccggaacgcagtttcagatccggattgggaatatggccgatgaaattgacggtgcccgtcgaacggctcacctcgctgtccacggaaaccaccttccccttcttttcaaagacggagccgtcttccagaatcagttcaaaatccggcatgtctcccatgcgcccggttttcacattcacggttccatccatcaggcggctgagaacctgttttcccgtcacggaaaaatccacccggatggggtcgatggaagacatggtagtgagcggcgagccgctggcggaaatcagttcccccacgctggccgtcgctttggaagccagtccccggaacggcgcgcgtactttggtgcggtccagattgatccgggcgttttccagggaggcttccgcctgcttgatgcccgcttccgcctgttccagagcggcctgcatctccttaaggttctgttgcgcgtccgtcaggttcttgacggaaatagcccccgtcctgatcagtttgtcatagcggtccaaatccttctgcaccctgttcagagaagcttccgcctgaagtttgacggcacgagccgtagccaggttggccgcctccctgtccacggcggcctgataggtagccgggtcaatttcaaaaagcagttctcccttgtcgcaaatggagccgtcccagtaaacctggcgtatcagcgttccggaaacttgcggcctgatgtccgcctgctccaccccgcgcaaatggccgaaccaggaagatttcaactccaccgttctctgctccatattcatcacggaaaccttgagcgggggcatttccctccggtttgcagcatccgcggcgccgttgtcttcccggcatcctgccagcccgcacagggccgctatcagtatatagtgtgctttcatgttgttggttaacaatattattgaagcatgcttcatatttttccaaacccgttccccggaaaaaagcacgtgcttttattatttgagattgtcgtacatgcgccggagcagatccctcagcatgctgcggctttcctccggcatcccgtccagcagcgtattttcaatcactcctatctgctggcaaatggcctcatgaacgccccggctcatatccgtcaggtacacattcttcagccgtccgtcttcactgtcaaaagccgttgttacccagcccttctgttccagcctctggacaattcccttggccgtggtatgggagacccccaaatgccgctctatgtccctctgggagacgttttctccgtcacgggacatcaggtaagccagcacccggccctgggaggccgtaacacgctccagagtcaaaccgcgcgtaagcatcatatccacgcggtccgtaatcattttcatcaaaaacgaaatcgtaaaagggtcggccataaaacaatgaagcatgcttcaaaaatgtgccgataggtactctttatccggacgcaagtcaagcggaatcagaataacagagctcgggaaaaacacgttggcctcaccagtaaaaataaatcaaatccgttcttcatcaataaactgaaaaaacaaaccatcaataatccgaccaccttcgcatttctttcccgcatcatccggcgtttcccggcaaacatacccattccagccacaggaaaccaatgctccgcgcagggataaagaaaaaatacctaaggaatggcccgcatatcaaaaaaggccggaaccgcttcgccttctttccagggacaatacgcgcagccgcttttcctctaccttgaatttcacctcccagccagagaacgaaaggccgtaaacccgttccggatcatcctgatactggggacggggatccagggacagcgtatcttccagcgcactcctctcttccggagacatggaaccgccaaaagattcgggaatttccacatccagccgttcataggggacagccgtaaacccttccgacgcctccggaatgcagtccgccagaggaacatagggcttgatatccagaatgggggtgccatccaccaaatccacgccggaaagatgcaataccgggccgtccagaggatgcaattccacccgttccagcctgacggcagacaacccgatgggattgggacggaacggcgcacgcgtggcgaacacccccatgcgcacattgccccccagccgcggaggccggaccgtagggctccaccccttatccacgttttcactgaacacccagaccagccacagatgggaaaacccttccagaccacgaacggcatccggatgacggaacggcggctcaaataccagccgcgcccgcgcatccggaaccaggccgctctggcgcggcgcaccgaatttgtccggataacacgtgctgacgcgggcgacgggctgcaagcggagactgatagttaataattaatagctgccggcctttctccgtgacgctttcatcagaagcggtggagctgttctccgaacaccacggcatccacttttcccttcaaggtcttgcccaggaatggggtgttgcgggcgcggctgcggagcgtttcatccgtgacgggcgtttctccttccgggtcaaacaccaccagattgaccggagccccttcttccagggagacgggggccagccccatcagcctgcggggagcgtcgctgcaggcgcgcaccaccgtctgccaggacatttttccaggttccaccagatactggtaaatagcgggcaggaacgtatccagcgcaatcatgccctgcggggcgacaacgaaatcctgaagtttggaaaacggcgtgcagggcgtgtgatcggaaacaatgcagtcaatggtgccgtcattcacggcggcaatcagggcatccacatccgactggtcgcgcaggggcggcagcgtcttgtagcaggtatcgtaccggcccacgtcctcatgcgtgaacaggagatggtgaagcgccgcttccgcgctcaacccggcggttttccgcttgcagcggcgcaggatatccacgctgccggccgtagagacggtctgcacatgcagggagttgcccgtatccacggaaaggcggatgatggtttccagccctatttcctccgcacaggagggggagcccatcaaccccagacggtaggaagtagtgcccgggtgcatggccgccctggccgtcagggacggcacgtctccgcgcagggcgaaagtaaggttcaaattgctggcgtactgcatggcgcggtacagcagcagcatgttgtccggcgcacggtccccgtccgtgatgaaacggacgcccttggcgcgcagggagtcgtaggaggcctgctcttccccgccgtcccccttggtcaggcaaccggaggggataacctccaccagagcatccgtccggcatatttccatgaacgtggtaatctgggcggcattgtccatcacgggttcggtatccggcatcgccatcagtccggtcactcctccatgcagggcggcggcggtagccgtagccacacgttccttgtcctcccggccgggctggcacaaatgggcatggatgtcgaacaggccgggcagaacaagtttcccggaagcatccagcgccttttccgcggcgctctccaaaagcgttccggcaggagctttcgttgtaatcacccccccggaaaccagaaggtccgccggggcggaaccgtccgtcagccgggcgttgcgaataagtacggaagttttcatgaacaatcagtgctgggtttgcggagtgagatggtaaaggatggacatgcggcaggcgatgccgttttccacctggcggttgatcaggcagcgctcatagtccatcgccaggtcacagatttccacgccgcggttgaccggccccggatgcatgatgtacaggccttcaccggaaatgcgcttcaggcgttcttccgtgacgccgtaaatcttgttgtactcccgggcgctggggaagaaaggggcgtcctgccgctctttttgaacgcgcagcaggtaaattacgtccggcttccaggcaaacgcctcattgaaatcggaaaaacggggaatgccggaatgttcggtgcgcggcaccagggaacccggccccaggaaggcgacctccatccccagcctcttcatcagcagggaggtggaacgggccacgcgggaatgcaggatgtcccccacaatcagaacacgctttcccctcacatccggaaacacctcccggatggtaaaggaatccagcagcgcctgagagggatgggcgtgggctccgtccccggcgttcaccacactggcgcaggtatggcgcgcaatcacgttcggcaagccgctgttgtaatggcgcacgattacataatccactttcatggcctggagcgtggcgatcgtgtcctgtacggattcccctttcaccacggaagaggtggacaccgtgaaattggtcacgtccgcagacagacgttccgccgctacctcaaaagaggaacgggtgcgggtgctgggttcataaaaaagcgtcagaacggacttgcctttcagggcgggcacctttttgacgcttttggtaaaaagctccttcatcgggccggccgaatccagcagcgtgtgaatttcctcgtcagtcaatgaggagatattaagaagatccttgcggggatgattcatgggaaacggagaatggattggaaaattttcagtgggaaggaatgaccacgctgtcctcgccgtcagcctccttcatgcttacgatgaccttggctccggcatggtccagcacgtgccccgtataatccggctggatgggaacttcccgcccgccgcggtcaatcaggcacgccagttcaatacgggccggacggccgtagtcgaaaagggcgttcagggccgcacgtatggtgcgccccgtataaaggacgtcgtccaccagcacgaccctcatgtcatccgtggaaaacggcaaattggaggaacggagggaaggccgggcttccagcttgaagatgtcatcccggtacagggaaatatcaatagagccgtactgggcttccactcccagctcctttaccttgtccaccagacgccgggcaatcacatccccctggctgagcaggccgacgatggcgagaggttctccggggaaacgggccacaatgccgtgggccatgcgctcaagcgcacgggaaattcccggaccgtccaatacgatttcctgtgaaggaggagtcatttgccggatgggggaaaaagttcacgttacagccccgccagttttaaaatgcggtgggcggccatggcggcattgacgggggtcttcttatgcaagccaaccgtagtgcagggcacgccgccgggacactgggcaatcgccagcagggcgtcaataccgttcagggggcctccggggaccggcacgccgataaccgggagggaacagctcatcaccaccacgccgggaagggcggcagacaggccggccacagccaggataaccgctttttctccgctggcttccaaatcccccaggaacctgatcagctccggaaggtcgcggtgggcggacagaacggtttcttcataaggaacattctcctgagcaaaatactcgcgggccggttccataaagggcttatcattcgggctgccgtagatgacgatgactttcatggctgtgtgcggttgtgaaacttgcagattatgcccccaagccccctgccctggcaagacttaacctgcaaaaaaaggaaggccccgggtggaaatgaacaacgggagaaaggaaacacaggagttccggaaccgttccgggaaattggcccggcatcccggtcattcctccaacccagattcgcccatccctccgccctctccgggaaccttcagttttccggagaggatatccttcctgatacggtaaagagccttcaacctttccttatcatccaatccttccgtttcccgcatcaggaataaagaaaactgtacggaacaattctccagccgatatttttccagaatgctcccccccattttcatgtattggcctccgtactttccgtaagcgttctgaatttcatcggcagtcatcttctctctttccacccgttccagcaatttcccggactccctaatcatcttcagatgcatggcgcggtaatcggaagggcatttatccagaatcccagcccattcgggagattgaatatatttcagcgtggccaccagcaccgcacgattatccttttcctccaactccacaatgcacgtccaaataatgcccagctgcaagtgcctggccatggcctccctgtacgccgctattttcttttcatcctccatttccaaatccacattagccatggagggcgccgctatatcctgggacatgccggaaaaagtcatcaaaaacgcagggagaattccccaccggaacagatttgacatgaaatcacgttacaggaatcttttgcgcagggtcaacaatattcttcccttccgccgcatcccgcagcattgacggccgccgccacggcggactgtctttccttcccggaaaaaacaagcctgcccccattcccggcttgatggcatccggttccggcataacaaggctcacaggggcgtatcttcatccagaaacgcagaaaagctgcatcgctccggcggccggacgcttgaaaaaacctagcgggtcgcctgctgcgccatggcctccgcacaacggcgtccgtccagggcggcggaaacaatgccgccggcgtaacccgccccttcgccgcatgggtacaggccctccagaccgggatgctccagcgtggcggggtcccttggaatgcgcacgggggagctggtgcgcgtctcacagccaatgagctgggcgtccgctccggcaaatccccgccatttacggtcaaactgccgcagcccctcccgcatgcgccagacaatcccttccgggagcaattcatgaaggggatgggatacgatgccgggatgatagctggtaggcagcagggaagaagaaacgcgccctttcagaaaatcctccaccttctgggccggggctttctgcatgcctcctccggcacggcaggaagccgtctccagcgctttctggtacgccacgcccgccagcaccccgtgttccctgcaaaacggttccgtatcttccggatgcacgctgactacaaaaccggcattggcaaatggagaatccctccgggccagagacatgccgttgaccactacctcatcgttctccgtggcggcgggcacgatgaagccgccgggacacatgcagaaggaatggacgccgcggtcctggatggtggtcgtcacggaataacgggctgccggaagctgctccgggcgcctctgctccggattcaggtggtactggcgcgcatcaacaaacgcctggggatgctcaatgcgcacacccacggcaaaggatttctgttccagagccagcccctccgccagcatcatgcggtacacgtcccgggcactgtgcccggtagccagcaaaacggaatccgccgcaaattcccggccatccgcgcaggccacgccgcgtatgcggcggccgtccgcagaacggagcagatgctccacacgggcattgaaatgaatttccccgcccgcgcgaaggatggattccctgatggctttgacgacattgggcaacagattggagccaatatgcgggtgggcgtccgttaaaatttccctgggcgctccgtgggctacaaaaatctcgtaaacctcccggacggggcctctcttggtcgcgcgcgtaaacagcttcccgtcggaaaacgtgcctgcccctccctctccaaaacagtaattggaatcctccatcaccgtgccgcggcgcaggatgggagccaggtcaaaccggcgggaggaaacatccttcccccgttccagaaccacaggcttcatacccagttccaaacagcggagcgcggcgaacatcccggccggtccgaatccaacgatcagcgccacgggggagccgggacggacggacggataatcccgggagggaagacgttccggcggcagcgggctatccaccccgaccagcagccgaagctggaagagaatttttttctgccgggagtcaatggactccttcaccagccgcacatctttgatacgggagggggaaatacccagcttccgcgccacggcagcgcggcgcacgcgctcgctgccggccttttccatcggcagaatcacatccaccgttattccttcccctccgctcacagtccctccttccccggccggggctgctgctgggtgatgcagtggatggcgccgccttccagcaccagcttgcgggcatccacccctattacctgttttccgctgaaacattcacgcaaaatgcccagggcgcgatcgtcattccggggctggttgaatacgggaacaatgacggcctcattaacaatgaggaaattggcgtaactggcagggagctgatccaggcgccagtcctccgcatggaggggatccggcatcggcaggggaatcacctccaccccggaaccgtccacgcatctcaaatcctgaaggcgttcattattctccgccagagcgcggtaatggggagaggaagaatccgtttccacgatggagactacggcatcccggcacacaaaacgcaccatgtcgtcaatatggccgtccgtatcatccccttcaatgccggaaccgagccagaaaacggctctgacgcccagcatgcgcttcaattcctcctcaatcatggcccggctccaatccggattgcggttgggattcagcagcacggactccgtcgtcaccagcaagccgtccccattgccctcaatcgcccccccttccagaatcagggaagaactgcgcacgggaagccccagcgccgccccaatcagggcgggaacgccgttgtccaggtcccacggggcaaatttgccgccccacgcattaaattgccaatccgccagcatcagagaaccgtccttcacatcctggacgaaaacggggccgtggtcccggcaccatacgtcgttggtcgggtggttgaacaggcggaattgctcctcactcattccggcggccagcatcgcctgcctgacgccgggatgaaggggagctgcggcattcacgcatacaagggcatgcggagcaatggcagcggccacgctcccataagtctgctgcaactcgtccagccccccttgccataaatccctgcggtggggccaggacagccagacagcatcctgaggctcccattcagcgggccagcgtacatcgggttccttgttcatggcggtatcgggcggttcaactgggctggtcctgaaattcataaggttcttcaaaagccttgcggaagctcatgaagcccttgaaatcatccagggaatcctccggctgtttggaaaaaacgtcttcctcaatcagtaaaaaaaccatctcccccacattcttcccgttcctaagcccccattccttcatcacggtggaagccatgggcccgaactgggcgagggcgtaatcccggaacccttccagcagttcctgcccgctgacatgcctctgagagccgttttccctttcttcaacgcgctgcatggtaaaatccagcgcatctttcagaaaagaatatgcccgttccgcaaaacggggatccttccgtacgatacggctcacggcatcttcaaacgtaggggtggtcatagcggctcaccgctaccctatacggctccttgtgaaaatcaagatttttgggagcgctccagcttcagccctcccttggggacagcatggggaaaatgaaggcagccgccccctcgctggaacggaacgccggacgcggcagacggcaaaattcccgtccatgatatagagcctcaaaaaacgcacgcgcccgcattttgaatatcatgcttctgcatgagctaccctccggcaagcagcggtttttacgttctgatgccgtcaaaaagccctgtaagcaggaaggaaaccttgccagcctatggtctgtttgttatgaacggaatactttatgttccgttcctccatcatgcttctggcaaccatgctgtgcgtttcctgcgtatcgcaccgacctatccaggacagcagctccccgcccattgacgcggccaatcccctggacggcacccccgtggcgctggcgtggagctccggaacgcaattaatgatgggcgtagacacgggagcagtccagacatccctgcttttctccccggcagtggaatccatcggcgcacgcctgcgcggcaggggcgccatgcgcacggccaacgtgcccgtttccctgaaggatgacggggaacccatttcccggaaacaggacgtagtaatggcagaccaggccccgtatgacggtttgctgggctgggaatgcatccggaaatatgtgtggaacatcaactatcccaaacgctcccaccgttttttcaataaacttccctccagaataaaaagctggaacaagctttccctgattcccgggtccgactatccgcaaatcgcggacaagcacggaaggcgcatcattctggacacgggagccccccacgccgtttacatctccaaaaaacgctggaatgccattaagcaggcctacccggatgcgttcgtcagcgtctattccggctacagccccgccgcaggcggcttttacgcccacgaatgcatgcatgtaagctccttccagctcggtccactggaattaaaaaatatcctgctctgtgaaagcttcgccaacccggaagtgatgggcatccccgatgacatcgacatcatcctgggctacggcgctctggccgcacgccagttctggctggacggcccggggaacgccctttatttcagctccaccagccaccggatgcccgcccccgcctccttcaacctgatgggaggcacctttatccaggacagcaacgggaacggccccatgaaagcttacgtggcagagtggtcgcccgcatgggacgccggcctcagaacgggagatgttcttatttccatcaatggaagaaagaatccctatccggacctcgtagaatatgttaccacccagcggggggctcaggccagcgtggtggtccagcgcaggaacaggctggtgcgcatccaatgggaagttccggccgcgccccctgccggggattattaccccacgccccaggccattacggaacaggaattcgaaaaccacgtcaggcagcaggaaaaaaaagaacagacccagccctccgcagacggccagcagcctccggctacggccggagaaactccggatgaagcctctcccgcagctgacgggaaaacggacaaggcctccgctgcctgagccgggccagcaaccagccatctctccacaccggcatgaacaacgaacaacatcaaaatacccacacttccgacgcccccgccattccctcccccttccagaagagaacctgctggcatgccctgacaggcgtatccattctggtgatgctgggcattgcggccttcgtcatttttgaagtagtggaacttctggggtttctggaaccggtgctcctgcccatcctgattgccgccgtcgtggcgtatttgctggaacccatcgtttcctggctggtgcgtctcaaattctcccgtccatgggcagtagtcacggtcatgtttgcggctctggccgttctggtaggctttggagccacgattctccctcccctgatcaggcagacggatgaactgatcgacaaccggatggagctatgggacaaaacctccgaactgattgactccaccattgaaatccccttcatttcccgcaccattgacagtgtttacagcaccagcctgcgggaactgaatgccagccattatacggaagcggaagtccatgacctgagaaacgcccggaccgcccgggaaaagctgggagcctacatgaccatcaattcctccttttaccaggacaagctgatgagctggctcacttccgggggacgggccctttacagcaccataggaatcatggtcagcatcctgatcacgcccattttcgctttttattttctgctggaggcggataaaatcaaagagaaatggcccagcatcctgcccctgaaagtctccaaattcagaaaagacgtggtggacaccatggaggaaatcaacggctacctgatttccttcttccgcggccaaatgctggtaagcatcattgaaggcattctgattgccatctgcctgaagctgatcggcctgccgtacgccattaccattggcgccgcggtctgcgtgctgggcatcattccctacctgggtatcatcaccgcctttatccctgcggtgttgctggcctggttcacatggggggatttccagcacgtgctgattgtttcgggcatcttcctggccgtcaaccaatttgacggatggatcatccagccgaaaatcgtgggggattccgtggaactccacccgctcacggtcatgttttccgtgctgatctggacactcatcctgggcggcttaatcggcgccctgctggctgtccccctgacagccgccatcaaggtcctttacaagcggtacatctggcagaatgccagcatgcgccccatgacggaacccgtgcttccgccggaacatcccggcgaacagcctccggacacccccgaagattcggcccacgcttaaacagcggcatccttccgaccgccctttccggaaaattataatcacacacacctgacaacatgaataaatccgcattacacctgatgcttgccctggcggcggcagcggcctgcccggccgcagtcacgccaacggtcaagccccccaaggccatcgtcatgatttacgctgacgacctcggctatggagacgtaggctgctatggagccaagggaattcccaccccctccatcgacaagcttgccgagcagggctgccgcttcacggacgcctattccaccacatccgtctgcaccccttcccgctatgccctgttcacaggagaatatccgtggcgcaaggaaggcacgggcatcctgccgggagacgccgccctcattatcgataccaagaagcccaccctgcccaagatgctccaatcccacggctacaaaacctacatgataggcaaatggcacctgggcctgggggaaaaggggaagaaaattgactggaacaaacatatctcccccagcccgaacgaaatcggatttgacgagagctttatcttcgctgctacgggcgaccgcgttccctgcgtgattctggaaaacggcaatgtccgcaacctggacccgaacgaccccattgaagtatcctacaagcacaacttccccgggcttcccaatggcaaggacaataaggaccagctcaaactcatgtggagccacggacacaaccaggccattatcaacggaatcggacgcatcgggttcatgaagggcggcaaaagcgccttgtggaaggatgaggaaaacgccgatgtcattacggataaggccattgaatacattcaaaaaagcgccaaagccaaggaaccgtttttcctgatgttcgccacgcatgacatccacgtgccgcgctgcccggaaaaacgctttgtgggcaagagccggcacggcgtgcgcggtgacgtgaccgtggaactggatgactgtgtgcgccgcattacagaggctctgcaacaggccggtctggaaaaagacgccctggtgatcttctccagcgacaacggtcccgtgctggatgacggctacagggatttcgccgtccgggacaacgccacccattcccccgccggccccttccgcgcaggcaaatacagcattctggaaggaggttcccgcattccgtttatcgtcaaatggcccggcgtgatcaaacccggaaccacgagcaaagccctgctcaaccagatggatctgggagcctccctggaacagctgctggcccccggcaaggccaattccttccgtgactctgaaaacgtgatgcccgcccttctgggaaaatccgccaaggggcgtgactaccatgtcatcaacagtaccggcaaggcattggcgattcgccacggcaaatggaaattcattcccgccggcgtggccattcgcgacggcatcaacggagcctccgcaaaaatgagcaagtccccggaaggaggaagcctctttgacctggaaaaagacccgaaggaacttgacaacgtagcctcccagcatccggacatttgcgaacagatgaaagccaagcttgaggaaatccgccagaggcccgaaaccaaggctgaccaggaggacctgcttcccttggacgactaacatccattcgggccagatcatgagagaatccgccacatgctcccaatgcggccacgggtacacctacccggccggactggacgccaaaaccggcatgcgctgcccggcgtgcggcgttttgattcacgttacaacggggcttcccttcggggaagcctcctcttcgccatccggccgcaaaccggaaaacgccatgaaaacgcaggccgccctgcctcccgtcaggaaaaagcggacgtctttctccggacgcgatactgacgaacgcggcatccggcaggaaaacctgccgcagcggccagccgcagcatccggccgccggattcccgctacatcatggctggcatgggggctgtccctgatcgcgttgattctggcctttattttcccctcctacggaaacggttccacagatccgctgtacatgcttcagtgcctgccctccatggtattcggctgcactgcggccatccttttcatccagggcctggcggctttgcgccgctaaaaaacaaagtctgcggccccatccggggcccatgcggcagccccgtcccaaaaacggccggaatgcctggtttccatgcccctttcttttaggcttgcctgtcaaatgaacagattttaagttacgtcccggtaaacgttatggaacgggaggcagaggcgaaggacaacctgtggagggccagactggatgccgtcctgatgcacaggatatggggttcccttattttcctgggcatcgtttatattattttcttcctgagcttcgctatcggggatcctctggtcaggctcatccagacgggcacccagctgttcagcgtctgggcctgccgcatgctggaaccgtggccccgcctgcaatccctgctgggggaaggcgtggtaggaggcgtgggcggcgtactggcctttctgcccaacgtggttctcctcttcggggccattaccgttctggaaaacagcggatacatgatgagggtttcccgcctgatgagccgcatcatgaaaatcatggggttgaacggcagcagctttgcccccctcctgctgggattcggctgttcggttcccgccatcctgtccaccaggagaattgaaacgcgcagcgaccgcctggtcaccatcgccgtgctgcccatgatgagctgtgcgggccgcctgccgatctacatgatgttcgtctccgccctgtttccctcccgcctgcaggcccccgtgctgttcgggatttatgccagcggcgtcctgctggcgctgtgctgcgcccggcttctgaaaaacacgcttttcaaggcgccccagagggattccctccaccacatgaagcgcctgcgcctcccctccctgcggaaggtgggcatcctgatgtggtcacgggctttcatgtacgtccggaaagcaggcactttcattcttggggcctccatcatcctgtggtttctgaacacctaccccaggccggaagaaaacacggcgccgacaaacgcagcggccatggaacattcctacgccggacaaataggccattggatggaacccgtcacgcaagtggccggatttgactggaaaatcaattccgccctggtaggagcctttgccgccaaggaaattttcgtcacccagatgggtatcctttatgcggtggaagacggaaattcgggcccggcggcccagcagacattgaacgcccgtcttaaagccagctacacccctctccagggcatcagcatcatgatattctgcctgattgccctgccctgcatcggcaccgtcaccgtcgccaagagggaagcgggcacctggtggttcgctctggctcaattcggcggattgaccctcctgggttttgcaacggctacgctgatctaccaggcagggctccttctgtaagagccagccataaagaaaccggaagcagggaataccccccggaggaagaaaaaatgaacctcgtggaaaaagaggcgcttacgatgcacttccgcaagttctcctgctctacggtcaagctatcacaacctcgtcatcatctggccacgaaagccgcagcataacaccatgcatggccgtgcaagcctcccctccgcaacaatccggaatcagtatgcatcggctgaagcctttcctgttttttcaagccgtccgggtatccttttccgtttgcagagggggggaacaacctgcggcaaaaaaagatcatgcagccatttccggaaaatcaatgcccttttgacagggagtaatcaaaaaaggggcaccaattatccattcggtaatctttgccctggatatgggccttaacctcatctccctgggaatccctcagacagccccgcgcccccgtccgcggaccggaaggacggtgttcattaatcgtcatcccatagcgtagacgccctttccccgggtccttctccgtcaacagctgtaccgcatttttccccaccagccggacagacttgatggcaatatcctctccctcagcccccacaagggaaaaaccataattgccaggatcgtcaaccgtcttcgtgtccagaaccaaaggggggcagggagcataaaatgccacttccaccgtccaaccctttccggacttcctgattttatgggtcaggggatgcacgggtttccagtccgccccatccaacaggactttcttcatgacatagcccacatactccccataaaggcgggacatgggcgccgtcaaatggactccgtcgctatactcgaaatgatacatcggggtcgtcatcacataccggctgtccttctccaaagccatctccagctgttccagggcaatagccggataatccgtaggattaaactgataataattcaaatgggaaccaacctgatagccgaaacagaccacatcgtttttctgcccggtcacggccctggcgtcatgatttatgtccctgatcagcttttccattttttcccggtaccattccctcgtctttctgtcctggtgatccgtctctccctgggtccagataaacgcaggcatggaaagggtcttcccttcccggtcagccagtattttggcggccttcaaatcatccaaaatgcggttgtaggctccagttcccctgcccagggaaccaaggctcgccccacccactcccgtcgcagaacaaatcaaccggatacgggaagccgtaacgggagaataatgctgcatcaggcggaacaaacgacaggcagccccggatacgggagtttcgccgcgcggaccgttcactccttcctccagaggaaccagcatcttgcggtcactgccgttctcatacgctctcacccctcccctgaacatatacaagccccctttctcctgcttttccgttacaacgggcttagccgtccagcccacagaaagggattgaccgtaagaagttaaataattccaatccgcccactctgttttccgggaagcacagatggatgcggaagccgccgcagccatgtggaaagcaagcaaaatcaaggtaacaggaatattcatcagataattcaacggactctgtccgtgaacatacgttagccgttccctctttttatcaattcctgaacacaaagctgtccatccattgctgcagtaccattacgccaggaaatacggaattgccgttccagccgggtccacgccatgtttcggtaccatgccgtaccggcaggaaaacgcattcaatataccaacgggattttttatcctccaaaagaaaggcggcagaaacattctccgtattgaataaacaacatgaaccatttcccgtctatcaacgccatatccgcctccatctgccttctgggatgcggactcgccctgcctgttttctcccaacagccggaaaaaggaaaacccgatgccgcccacatttccaaaacaaaagctgactggtggagccagaggcacgccctgttaaagcagaccctggcggaaacaccatgccaactgctgtttatcggcgattccatcacccaccgctgggaaaccgacggcaaaaaaatatggtctcaatattttttccccctatgctcctgtcaatttcggcataggaggcgacaggacggaacatgtattgtggcgcattgacgattctgcccttaaaacgcctcattccccccaagtatgcgttatcatggtgggcaccaataacacagggcaatacaaaggcaggcagaccccgcaggaaacggcggagggtatccgggaaatagcttcccgggtccatcggctccaccccgccactgaaattattcttctgcacatctttccccgggggaaaacggcggaagaccccctgcgcatccaaaatgaaatgatcaacagggagctggacaaaacaaatatgccgagagtccatgtcgtcaacattaattccgcattcctggacaaggacggcactttcctgccgggaattaccggggacctcgtccaccttacagaaaaaggctaccgtctctgggcggacgcactgctgccggaaatcaaaaaatacatgaagtaagtccgctacccccttccgcccggctcaacggccaattcggcctcatctgcgcagaagcggccagccaatcatggttgtcactcccgcacataaaaaaccggagggattattttccctccggttttcggatacggccgttaaaaccgtttaaattgtcttaatcacggaagagtcgtcatcatccctgtcctcggcagaagcggccttcctggtgggaacaggcgtcttcctgaccttttccagagccttgtccaccgccgcaatcaccttgtcttccccggtcttctgactggacaactcattataaatcttttccttggcctcataatcggccttggctgccgcatcgccgggattggccttgaaattgtcctccgccttgaacaaggcctcctccgcagcctggaactttggttccaccgcgtttctctggtcttccgcagtctgcttgatgcggcccagcaggcgaatcacatacgggcggttgctgagtctcttgaatgcggaaaccagaaactggcggcgttcgctggttttggcatccgcaataagggggtcaaacaacttgagcgtggcgttgtcatcccggtcacggtccacggagagtacgcggagaatcgaatcatgggcctgggaacgcacgcgttcatgcagggattcgtctttccaggccttgaacaggtacggaacggcgtcatccgtattccagtccccccaggcggtaatgatggcaagcgcctttttggtatcctccttatagctcttttccatcatgtccagcaccttgggatcaccggtgcgggccagcagcttgtagagcattttgacgttttcctccggcatgtttttctgatactggagcagtttggaggaaagcgccttgcgcttggctggaggagcttcgtcaatcaggtagcgcgccgtacggaaagcggaggaaatcaaatccggggaagcatccttcttctggaggatcttcatcacgtcgtcaaggtcgtccagcttcatggcaaaacgcatgtacttgagcaccacggcctgcttgtcctggatcttcttattcttgctttcgctgatggaagcgtacaggtctttcagcatgtcgcgcatggcggggctggaagacttggccaaaagggtcaccatcatggaatatttttccttactgtacctgccgacattttttttcatgtcttccaccacctggcgggcaatgttgtcatccatctgggccatgatggaaaccaggtgggcggcgccgggccagttttccctgttgcccttgactcctctcacattggcgagcagcagagcggcatcctccgcgtcgggaacgactttcacatccggaacacggctgagattcttggagtcaaacagacggctgcggcccagtttcccgccttccacgaccagcgcattcaggcgggcgttctcaccttccaccttttctttcttgctgctggtgctccatgcataaatccctacgccggcagcgatgacaaccagggcgcataccccataaataacaccccgcagcagggatttggatttatccacggaagcggccatatcccgggcggattccgttccggcgggaggctgaataccgccgtcgcccgccggaggagcgccagcggcaggggaaactccctcggcggccacaggctggggaaccgcagcgggagccacggaagaagctggtgctgcccccacgggggattttaatactttcagcttgggaacggcgctttccggagcggcggccggggatttctccgccgcagcgggagccgcggccatcttgaaaactttcaatttgggagccccccccgcaggagcaggctccggaacagacggttccggggtctgcacagccgcaggcgctacccctgcggcctgggccagagcagcggcctgagcctccgccagggctttctgggcctccgctaccttggcaagggcatcctgaatctgggcgtccacggaaggctcgggctgcggagcggaagcggcttcctttttctccagctccgccgcaaggcgcgctctttcctcttcggcagctacacgggcggcctccttttctgcggcaatgcgcgcggcttcggcagcctcctgctccgccttgattcttgcggcttcctgctcggcagctattctcgccgcctccttttcggcagcaatacgggcggcttcctgctcggcagccgctttttccgcagcaatcctgtccgcctccgcctgttccgctgcgcggcgggcggcttcctcctgctcctgagccagcttggcctgcaactcaggagtgagaaaacgcggcttgacaacctccacgccttccgcggcgggagaaacaaactttaccttgggtgcggccgcaggggctgccgttaccaaacggcgtcgcaatttgggaggttccggcgaagaaggggttcctgtctgatcggtcatcgtgataaaatggctgggaaattggagtgattttatacgattccgcggtcccctgcaacctcaaaataccgtctggaaaacgggcggggaacagccgccgtgcgtggctcaacaggcagattgcgaaaaaaggcttcacccgagatataacatggaaaagcgtttaaatatcccgcgtattctcccgcaaaatcataaaaaacacaatatgttaacaacaacaatcatgaataaagtaaagcgcccgtaatagaacttcaagaatacgtaccagtcatttaagaatcctcttaaaaaatgttataacacatatacttttttcttgccagaccaaggatgattagttaaataaataaccactcgtcaacatcatgaactccaacgacagtaccaaaaataagaggcgctacacgcctgaagaaaaacaatccgttcttgatttcattgctgaacggaaaacccaaaacaaaaggggtgcccagaaagaagccgccgaacgcttcggcatcagcacggtgaccatctcaagctggatgaaggcatccaaggccaagcgcggccgcaagcccggcaccaaaaatacaactgctcccaaaacacagcctctcgcagccgcccaacccgccgacctgcgccgcctggcggccgttctggaagaaatcgccgaccttgaagcccagacagccaaactcgacaccctgcgcactgaagcggaggaactcaagaacaggctgactgccaagcaggcctgattgcttttattccttcctttttcggaaaaccggcttcccctgacaagggaagccggttattttctttacggagatcgcgcttgcccccccggaacaattcctttaatatccgccgtcgtgactcaacccgcccacattgctcccgcgagtcagtctgtggaaggcatgtatgccgactactttctggattacgcctcgtatgtcattctggaacgggccgtacccaagatcaatgacgggtttaaacctgtgcagcgccgtattctgcacgccatggaccgcctggacgacgggcgttataataaagtggctaatatcgtgggagacacgatgaaattccatccgcacggcgaccgttccattgcagacgcgctggtggggctgggacaaaaagggctgcttatcgacacgcaggggaactggggcaatattctgacaggcgaccccgcagcggcttcccgctatattgaagcccgcttcacctcctttgcgcgtgacgtagtattcagccccaaagtcacggaatggcagctctcctatgacggcaggaacaaggaaccggtcagccttcccgtcaaattcccccttcttctcgctcagggagcggaaggcatcgccgtggggctttccagtaaaattcttccccacaacttcaatgagttgattgaagcctccatcgcctacttacgcggccagcccttccagcttctgccggactttccgaccggaggcgtgatggatgccaccaactaccgtgacggagaacgaggaacgggccgcgtccgcatcagggcgcgcatcctcacggaatcgaagaaacttctccgcatcacggaaatcccgttcggcgtcaccacggaaatcttaattgattccattgtctccgctgcggaaaagggaaaaattaaaatcgcccgcattgaggacaatacggcccagcatgtggacatcctggtccatctcccggccggagcggatccggagcagacgaggaaagccctgttcgccttctccgcttgtgaagtcagcatctccccgaatgcctgcgtcattgtggaggaaaaacccaggttcatgtgtgtcagcgacatcctgcgctacaatacggactccaccaaggaaatcctgcgccaggagcaggaaatccgactcaaggaactgaacgaggcgtggcaccaggcaagcctggaaaaaatattcattgaaaaccgcatctacctctccatagaagattccgaaacgtgggaagaagtgctcggcaccattgaccgggaattgcagccgtttgcatcccggctgcgcgcccccattaccagggacgacctggtaaggctgacggaaatcaaaatcaagcggatttccaaatttgacgctttcaaggcggaccagcacatccgccagcttgaagaggacatcgaacaaacgcagaagaacctcaaccagcttaccaaattcactatccgctggtttgaagccctgcgtaaaaaatacggcgccgcctatccgcggaaaacggaaatttcctccttcggctccgtaaaccgcgcgcaggtggctgttgccaatgaaacattgtatattgatgacgaaggctttgccggttacggcgtcaagaagggaaaccctgtctgcaaatgctccacgctggatgacgtgttgatcattgacaatgcaggcgtgctcaaaatcgtgcggattcaggacaaatttttcgctggtaaaaaccccctttatatttccgtcatcaaaaaaggggacgaccccgtgttcaacctgatttaccgggacggaaaagacggccccatgtacgccaagcgtttccgcataggagggttcaccagggacaaggaatatccgcttacccgaggcgcaaagggaacgcgcatcttccacttctccgtgcatgaaacggaggaaaacagttcccagataagcgtaaacgtttatctgaaagccgttctgaaactccgtaacctgatcaggcccttccacttcgcggacctgagaatcaaaaaccgcggtgcccaaggaaatatcattaccaggcatcctgtggaacgcgtctcccgcatcatgcctccggccaagtccggaaatgaggaaacggaagggccaacaaccgctccttccgcaacagcggaacggacggaaggctcacccgccccctccgcggaaacgctgcatcctgaaacagccccacatttggaggaaccgcctgccgatccgccgctggaacagggctccctgtttgactcctgaaacgttttcaatctcttaaaatggaaatatccatgcctgactatccattttcggcttgccacaacgggccatcttctgtagatatggaccacctcattaccatgccgctttagctcagtggtagagcacccgccttgtaagcggacggtcgtcagttcaaatctgacaagcggctccatcataacccgctcaaggtcaatccttgagcgggttgcttttatgaggcgtgcgccattactcgttcccatgaatttccggcgtgccgcttttgaacattcatcatccattcatatctccggcggaatgcggcagccgcaggaagcaaagcgggacgcaacatctggcaagaggccattccacccacaggcatccccgtcaacttccggcagcgaagggccattcccggagcgggaagaaggttccgttggcgataacgccgcctcagcaagccgtttccccccttgaatacgcctccattgccatttcgaccaagggaaccatgattcaagccaatggatactacagaaaaaaagatggccgcggctatcctccggtttgaagacagccgcgttaccgggccggattccctgcgcgtttctcgccttcctgccgccgacaagggcggcaagtgggagatttgcggcatttgcgacggtattgaaccgaccgtgtttaacagattgaaggccctgctggatgccggaagacgtgaagaggcctgggaaggttgtctccagtatgtcctggataataccgccgccgtgcgttcctggctgggttccgacgcttatcctggcgttgaattcatcctgcgcgaccattttttcaattccgggagcaggaataccgggaagattttgcagcgcgcgctgaacattcacggcgccgggcttgtggtggacggcatcccgggaaaacaaacccggcagatgttgcaaaccgttctcgcccaaacgggagagtccgaatttctctccactctgaacgaacggcgcaaatcattttaccattcttgcaaacagttccccgtgttcggcaaaggatggctgaaccgcagcaatgaggcataccggttcgcacaatccctgatttagggaagttcctgcaaaaaactcccggaaaaggagtacaggaaaatttaaccatcgttgcagcaacctgtttccatgcgccggatgccatgaaagagcctccgtgcaaacatccgcacggaagctctttcattaacaggatcaggaaaacgcttcgtcccccacaaatgctcccagcagacggcaaaaccgggaagcaggtaattttaccaatctcccgtccccccgcttgccatgctgggtcagaatccagggcagggaaagaatctcccgtttataagccagcaattcccgtacatctcccgccagaaaatggagatgccaggcatcacaccgtcccggctcaaaacggaagcggacatcgacaacctttccgaaaggtgcggcggaatccaccctgcgcgccatcaggacaagctccggagtacggatatagacatcctggaggcggccgtcttcctccatttcttccaccctccggcctgcagccagataataggaaaaggcggcagataaagcgttcatacccagttttttcttatgccgccccaaccgctggctcaccggacaatccccatcggaacggctcctgaagagccgtttttcctgaaaccgccggggcaaaagatcggacggcgcccagtcatttaccctgccggattttccggataaccggaggcatctccgttttcggctgtttctgggagtaggacaaatgccccggttccagcaccaggcaggaatcgtccctgcatatctccgcccgctctgcagtcacgtctacggtatgcccgcagccggagaggagggaggacgccgcataagccgctccggccagaaccacccacaagagacgttcccaccaggtcaatccgggtcgtgttccgcttttttcataagcgtttttcatgccctgttttcctgcctccagagccgctttcttttgttcttctgtcaaattgaagtccatttgagagagggggtgagtggtttcaggaattctcgcgcatgttgtgccgcaacggttccgcggggaaaactggcgctgcggcaggactgtttattgctattcattttgttctttttttgttcattgcccggaaacggcctttgccggcatggaaccggcggtgacatcagaccgctcccggacacagacatccttgccctgcccttggggcgggagcaacacgcctgatacgtccgggaacaaggaatattccgccagagacaaacgccggaatttccgccgcggataacaaataccctgttgaaaacggaaccggttcatgctagtctcttccctgctatggcaaaaccggctctggggaaaggctttgacgcccttatcaatcaaaatttgtctcgtgaatccttggcggctccccaggcgggagacgttgtgcatcagctatcccatgccgccattattcccagctccctgcagccgcgcgccattttcacgccggaacaactggcggaacttgtagattccatcaaggaacacggcatcatccagcctttaatcgtccgtgaaacgcaaaacggcaaatatgaactgattgccggggaaaggcgctggagagcctccggcatcctggggctgtccaccgtgcccgccatcatccgggaagcttccgacaaggacgtgctggaattggccctgattgaaaacctccagcgggaaaacctcagcccgctggaagaagccgccggctatatgcgcctgaaaacggagttccgcatgaaacagggagacatcgccaagcgcgtaggcaaatcccgcgccgccgtagccaacagcatgcggctgctcgacctgccgcagccggttcaggacatgctgggcaatacctttatcagcgtagggcatgccaaggtacttctctccctcaaaaacaaggaccagcaaatccagctcgggcgcgacatcgtcaacaagggctacaccgtccgccagacggaaaaggccattcagaagatgctcaacccgccggatccggctcccgctaaaaagccgtcctcccctcagtacaagaaaatttccggcatcctcgccaaacaattcggaactccggtgaacatctccggccagggaagccggggctccatcgaaatcaccttctccagcaaagcggaattcatccgcatccttgagcttctgggccaggatgaatggcccgattccaagtaaacttcctccccccttttccatgacgccccgcatcggacttctcctgttcacggccctgctgatgcagtgcgaaaaccccgtggaaacgcccctgcccggtgtggaaaccgttcccgcgcaaatccggcagacggactgtttcaatggaggaaacgctctgttccacgccgcgcggataacggaaatggggaaccgcgcttcaggcactcccggttaccgcaggcagatggactacctgaaggaggaactgaccaaatacggctggacctgccgggaacaggattttgaaaaggaaacgccccagggccccgtccgtttcgtcaacctgagggctcgttttggcaaggctccaaatttcctggatccggttcgaggcctgctgacctgccatattgacaccaagcggggcattgacggattcaccggagccaatgacggagcatcgggagctgcggccattctggagacagcccgcattctgtccggagaccccgcacgcgccagaaatttggagcttgtgttttttgacggggaagaaagttttgcggaacatatggacagcgacgacggcctgtacggctccaggcattacgcatcctccatgcaacaaccgctccccaaatggataatcaatctggacatggtggggcggcagggtaaaaagatacgcatcccggccatgacgccccaatccatgtaccgggtttattcccgcgctatccgtgaactgggttattccccggaagaatggggagtatccggctatgccatcctggatgaccacgttcctttcatggagcgcggcgtggacacgctgaacctgattgacgacttccaggacggcaactggtggcacacctccaaggataacatcggcattctgggcgaaaaatccttccagcaaaccggagaaatgacccttcatatcctccggcaactgctgcccggaccgccctccacctgaccaggcagctctgaccctccaattatccctgtcccgccatgtccttcaactctccctggctgctgtgggctctctttgcagcctccgttcccatcatcatccacctggtcaaccggtggcggcaccgttccgtcccctgggcggccatggaattccttctccgtgcggccagggaaacacgtggaacgaaaaaactgctgcactatctgattctggcgctgcgcgtgatggccgtggcggcactggtaacggcctttgcgcggcccctgctcggaagcttcttcggctggggaagctccggattgaatgaagtcctgctggttctggatcgttccgcctccatggatgcccatccggacaaaaccagctcccttcgggatgccatcccccctctggtggaatccactttcgcgcagctcggccactgccgcctttccctgcttgattccgccactggaaccgttacccagattcccgctccggaagccctggcggacctgactgtaagcaagacaacggatggaggcgcagatattccggcacttctgcaaaaagccatcccgtacctggaagaatccggcgcaggaaagacggaaatctggattgcctcggacatgcaggcctcttcctggaagccagactcccctctctggcccggtgtgcgccagaggctggccgcccttcccctgcccccttccatccgcatcatggccctccgcgacaggccggaaagcaaccgcggcatcagagtccggcaggctcaggtaaataacgggaaactggtgctggatctggaagtgctgcggcaggggttcaatcccaaccagccggaggacgtgccggtgcagctttccgtggataacgcctccaccgctgccacgctgcaactggcaggggaaaacacctccatccggaaagaaatccccctgccgcagggcaaggaatccggcttcggcttcgttgcgcttcctcatgacgacttcatcagggatgacatttccttcttcaccttcgcccccaggcctctcgccaacatcctgattttcggtccttcgggagaagtggggaaaaccctttccctgatgtccgcccctcccggcctggccagcaggaaagccacgatgcccggcaatacgcgggaagctcaggctaatctggcctcccagtccatggtcgtttggtacgggccgccaccgcgcgcggaaatggggaaaaaactccagacatacattgaagaaggaggaatagcccttttcctgcctgacgacacggaacacggaacacggcattccttcctgggcgtttcctggggcgcaacggagacggctccgtccgaacaatactaccgtctggaaacgtgggaccggcaaaggggattcctccgcgacggttccgatcagacacccatccccgccaaccgtctccgcgccgtgcgcaggaaacccctgctgggcaaataccgcactctggcctcctgggatgacggttcctgtgccctggcccaggtcagggccggaacggggtccgctctgttcctgggaacgctgcccagatattcctggtccaacctggcggacggccacctgctgctccccctgctccagcgtatggcggaccggggggcggaacgcttttccacctccatttccctacgggtgaatgacgcctccctgccgcaatccgccacggatacccccgtgcgcctggataatgcccagggaagccacccctccggttctccggctgatacggcgggcgtgtaccgactgggaggacagacctacgccgtgaaccgtccctggccggaagacatgcctgaccagattacggatgaaaaactccacctccttctgccggaagcttccatcagttccatgcagagtgcagaggaagcccccaccctggtgcaggaagcatggaagctcttcctgttcttcgccctcgcctgcctgctgatggaagccctcctgtgcctgcccggccagacggccaaactcccctcccccaccacccgtccatgaacctgagccttcaacctactgcgtcaagcgtcatcctgaccgtcctggttatggcggccggcatctggatgagctatatcgcctgcaagcgcaaccgccggccgctgacattcaaactggaaattcttcgcctggcaatccttggcttcatctgcttcctgctcttccagccggaatggctcatcacctcctccccgcaggaaaaacccaaggtttccattctggaggaccgctccggctccatggaaacgcaggatgtggaaatctccccccagcatgtcgtcacacgcacggcctacgtgcaggaactgctcaagggcaacagtacggaatccctcaaagacacgcatgtagtggaatacgcctccttcggcgcgtcacctgcgccggactctccggattatgccatggccggcacagacctggccaaaccgctggaggatgccatgcaatcctccgacaacctccgggcggtcatcatgttcacggacggtagccacaacgcctcatcctccgtgctgacgcaggcccagcgcatgcgcaccaggggaatccccctgttcatcatttccgcaggcagcccgtatcccctcccggacctggcccttcaggacgtgaaagcccccacttacggcatcatcggggaaacggtgcaaataccctttaccattaaaagcacgctgggcaaggaaacgcgcgccacgctcaccatgatttccagggacacagggaaaaccgtcacccgcacggtcaccattccggcccagggagaggtatccgacgccgttctgtggaaaatagaaaaagaaggggcggaaacgctggaactcaaactccccgcccagccccaggaacggatgcacaataataacgcctcttccttcagcatctccggcaggagggaatccatcaaagcactggtcatcgatacactgccgcgctgggaataccgcttcatccggaacgccctgtaccgggatcccggcgtgaacgtgcacaccctgctctttcatccggaactggaagaaatgggggaaggccccggatacctggtcaaattcccggacagaatggaagacctggcccggtatgacgtcatcttcatcggcgatgtggggctgggctccaaagggctgacggaagaacaggcctccctgctcaaaggcatggtaaaaaaccaggccagcggcatcgtcttcctccccggctaccagggcaggcaaatggaactcctgaaatcggaactgggggacctgatgcccgttacatttctcaacaccaaaccggaggggacaacccaaccttccccatcaccccttatcctgacgccggaaggccgcggctccctgcttaccatgctggcggatacggagggcgaaaacgaagaagtatggcgcaatctgccgggcttcaactggtacgcccccgtggaacggaccaaagcgggaagcactgtcctggccgtgcatgcggcggataagaatgcctatggccgcattccccttattgtcacccagtcctgcggcaacgggaaagtcctcttcatgggaacggattccgcctggcgatggaggcgcggagtagaagataaataccattaccgtttctggagccaggtggcccgctggatgagttaccagcgcaacatggccgcaggagaaagaatccgtctgattcccaccccggaacggccccggccgggagacacgctgaccgtcaccgccatggtctccgacaaactgggggcccctctccagaatggagaggtttttctggacattacaactccggaaggaagctccagccgcgtgcaaatggacacgatgaaccatacatggggctcctttaccgcctccgtcaaaatcaaccgtcccggcacctggaagctcacagcttcatcctctgcggaaccggataaatccgttacgcttcccatcatcaccatgagtgaaacgctggaaaaaatcggcagccccgtcaataccgcgctcatggaggaaatggcctccatcacacgcgggcgcatggtaaaagctgaggaaatacagcggctcattaaggaaatcagggatctcccggtgccgccgcccatggaaacgcgcatcctgctctggtgcagcccgtatacgctctccatcctcatccttctgcttaccctgttctggatagggagaaaactcaacggcaccatttgagacgcaggtttcccacacctccccggcaggagtttttcttccctcccttcccgttatttttccgcggacttcccgtccgcggcagcagaagccggctgagaaaatctcagcctcaatcccatttttttccaggccgcggccatttccccctgtacatcctccggagtcttcccatccagcaaaacagcacgcgccttcccgccgccctccgcatcacgaaccctcaaatagcttctgaggcgctccgcctttccgttcccttccaggtggctccagtaaaccatccacaacaaatcggcccaatactgaagcgttcctcccctggaggaaacgccatgctccgcggcggaatgtgctgaatccctggacagcatgtccgccagggccggcagagtttctctgcccgtgcggacggcgcgcggaaccattgcggccagcctttccggaatcttccggaatacaggcgcttccttctccatgggaagaaaagccatgtacgcggaaaagccgtccaccagccagtgctcccaatccatggactgcgccgcccagtgcgtgacggcaaagcgcggatccagttccggcttcagcagctttcccttcttattccgcaacagcagagccgtgaaactggtaggggaaaacttgagatgcccgttccgcaggcccggagccctgttgaaatcctcttcctggaaacataccctcaccagatacttgcgggaaggccggcgggccaccgccagattcaacggaacagctgccagggcagacagaatggtttcaaaacgccgggcaaggatcatacgctccgcttccggcagctttccgggagactccatgatgaaatgatccgtttcatacacgctcaattcctccgtctcctgtatggtttttaccagcaggaaaccgggaacggccaccctctccggccagggagcatcccaattcggctccagaggaacgtatcggctgccggaatctccctgcgcaggagggttctccgcccctgcatccgtatccggaagcgtcccgtcagactttgcccattccagaatatattcctgatcggctccggaaaaaatattccggggaacagccaccacgcgcccgtcctgaagcttcaaatccacctccgcatcacggacggccaccagcacggctacgacggtagcgccccggtcattcgtccaaatacgcgcccgggcgcttccagccaggctcagacccgccaatacggacagtatctttacaggtacggtcatagggttccctttgcccgcacaagctatcacattgtcccgcagacgcaaccctttttccatccccctctcttccggaacctgttccttgaaaagaatatgagaaaggaatcctccgcagcctgtcccccggaggggttgacacgctccggcaaaacccataatcttagggaaggaaggaaaagaaagcatgcatatcagtcccctcagaaaaaatattccgttgactgtcgtcaccctggcggccctgggcatcatgttcttcctgttcttcatgcatcccgcctctacggaagaatcactggaattctatgcgccggacggcaacatcgcaggctccttccgggtggaaatcacgcatgcgccttccaaccccgcctatacggaagtaacaatcatcccggaagacatggaatccttccagcggtttttgacccagttccgccatacacccgttaccgcaaaaattccctcctgcggcagccacatcattattccgggccgggacatgcaatacgacggcgtcctgcgcctgaccggacattgagaaggcgggcagacaaaggccctcttaaagttgttccccttttcccacatccttcgcccacttccgggccaggaaggagcagaccattaactggagctggtggaacaccatgatgggaatcaccagcagtccgatgggggctccggcaaaaatcacgttcatcatcggaatgccggtagccaggctctttttggagccgcagaaaataatcgcaatgcggtcctcgcgggaaaaatgaagcctgcgggaaaggaaagccgtcagccacagggccgcggccagaaggaggccgcaaaaagccaggacctccaccagggaaagccagggcagatttttccatacgccgttaatcatcgcatggctgaacgccgtgtaaataaccagccagatggtgctgtggtctgtccaggaagtaaggttccggtgcgcgaccacccatttgccgatccagcgctgggcgaactggccggccacaaaaggcaccagaataatatagcagatgttcaggaaagtggaaaaatccacgcctccttcccctccgcgggaccacaccagccccaccagcaagggggtgaggaacacccccagcaggctggaaacggaggcggagcaaatggccgcggccacattgccgcccgccatggaagtgaacgctatgctggactgcacggtggaaggcagcatgcacacgtacagcatgcccatgcacaaatccggccccagcacacgactccacaagggcatgctgaccatgcccagcagggggaaaatgacaaaggtgctcgcagccaccagcccctgaaggcgccagtgcatcaacccttcccatacggaacggcgggaaagcttggccccgtacaggaaaaaaagcagaatgatggctgcatcgctcaggcggctgaacactgtatcccatactccggaacagggaaccagaatccccgcgcccacactgacgatgaggccgatagtgaagcgatccaatttggcaaggaatcccggcatggaaaaggaaaaaggtcaatgccgcctccggcgttctatttgaaacgcacagcatgcttcttgctcaggcgcaggacgctgcccggagccagttccaaaacggcggagggatctgtcattttcacatcattcaactggatggcgccgggcgcgaaatgctccttgcggagaacgccattggattttttcacctggaaaacgttttcaaacaggaaggagaccagagccagggcattcatgccggcaggcagggaggcaatctccacttccggcaaatccgcggcggccagatccctcttggaaaaacgggtttcccagtcagaacgcgcggcatccgcagcggcggaatcatgatagcgggccgtgattttccaggccaggagctttttggcttccatcggatgcaatcccatgtcccgcttctcgcccagcagcaccaggtaatagcgatccatcagttcgtcgctggcgctcatcatcttgccgaacatcatctccggcgcctcatccacgcccacgtaattcccgtaggacttggacatcttccgcacgccgtccagaccttccagaagaggcatcgtcatggcgatctgcggcagcatgccttcctccttctgaaggtcacggcccaccaggatgttgaaaagctggtccgtcccgcccagttccacatccgcgcggatttccacggaatcccagccctgcataatcggatactgcatctcatgcaggcgtacctccctgccgctctccacacgggccttgaaatcctcccgggccagcatctgctgcatggtcacgcgggaattaagcctcagcacttcctcatacgtcatcttgcggaaccagtccccattgtacacgatctccgttttgtcacggtccagaatcttgaacgcctgcttggtatatgtctccgcattctccagcacctgttcacgggaaaggggggggcgggtcacggaacggccggaaggatcgccgatcgtggcggtgaaatccccgatgagcaaaacagcctggtggccaagttcctggaactggcgcaatttctcaatagccacggtatggcccaaatggatgtctggagcagtagggtccacacccagcttcacgcgcagggggcggcccagcttgaggcgctccttcagctcttcgcggctgatcacgacggcggtaccgcccatcaatatgtctaattgctcatctatagtcattgatctggcgcatagagtgccgggggcgccgcgccttttcaagcctatatcctgtgcaccgctcatcgaacgcgatcagggggatcccgccaccggtcccgacaggaggaaaaaggaacggaagaacaggagcggattccaccccggagagcggaataaacgacaccccggtgcaggatttttccccgcgcggccctcccgcctgttccatatcacaagaatgatacccggcctccttcctgctgcggaagctccccgcaaactctacagaagctggtacaggcggggataggaagcgtggttggcggttatgtaatgcgggcgcggcttgggaaccggccttgtccgcccgtgattccagccgtcacgatcatgatgatcatggcgcggcggcccggaacggtaataatcatgctcgtggtggcggtggtggcagcctgcggccagaacgattgaggccgccgcggcaaaaacaggaattatgttcatcttcatctttcttcatggtaagacagcccggcgacgggaatgcgaacggaaaaagtctgtcacccgagcaaacgctccctgttaacgaagaaaacggcccccaatacacataaaaacgcccacaggtaatcccacttccatttttctccgatgtagaacagggcgaaaggaataaacacgcacagggtaatcacctcctgcataatcttgagctgggccacgttaagcccgcccgcactgcccaggcggttggcgggaatcatgaagcaatattcaaaaaacgccaatccccagctcatcaaaataatcatcagcaggggcttgtcatccgccccggaacccttcttcagatggccgtaccacgcccacgtcataaaaacgttggagaccaccagcatggaaatcgttaacgcaatcttcatgatttttacttaaaaatatcaatccctggaggacttgggatccagggcgtcccgcagtccgtcccccaggaaattcagcgccagcagggtagctgaaaacaggagcgccgggaacagaagcaattccggactaacctccatgcggtccgcaccttccttgatcagcgttccccatgaggaattgggagccttcacgcccagccccagaaaggacagaacggcttccagcagcatgatgccgggaacggccagcgtcgtgtacacgatgacggttccgaacaaattcggagcaatatggcggaacagaattttcatgtgaccaatgcccagggagcgggcggcttccacgaactcctgccctttcagctccatcgtctgcgtgcggacaatgcgcgccagcgtcagccagcccaaagcgccgatggcgatgaacaggggaatcagcccggtcatggggctcaccatttccacagaccagcccgtcatgccggaaacccactgcgtcagcctccgggccggctcctccacggacagggaaaaaataatcaccagcacaatgaacggcagggcaaaaagcacatccaccaggcgcatcatcagggcgtccagcctgcctccggcataaccggaaaccagtccgtacgccacaccgatcaccagggaaacgcccgtggcgaccacgcccaccagcagggaaatgcggccgccgtacaacacgcgcgccagcaaatcccgcccaagctggtccgtgccgaaccaatgcccccaggaagggctttccgcaatccgggacaaatcctgcacattaggatgcggaagccacggcagcaggggccccagaaaacaggccgccgcaatcagcgccagcgccagcagggaaaacatggccgcccggttgcgggaaagacgcagaaaggcgtctttccacagggaggaaccctgttcctccgtcctgttccatcctcttcttctcatgattcctttctcaatctcggattgacggccatttgcatcaggtccacacccagattggccgcgacgatcagaataccgtaaaacaaaacaaggccctggatgagaaaataatcccggtccgttgtcgcgttcacgaaatgctggcccatgccgggaacctggaagcaggtctccaccacaaaagaaccggtaatcatggcggcaaaagcaggccccagataggaaagagccggaatcaggccgcctcgcaaagcgtgcttccaaaccgtacggaaaggccccgcccccttggcccgagccgtccggataaaatcctgccccagcacttcaagcatgccgccgcgcgtcaggcgcgccagatatgcggcattcaccagacccagcgtcaaagccgggagcactacgcaaccgggggaatcccatccggccacactcaagccgggcacatgcatgcccaaggccacgcccagcaccggagccacgacaaaggcgggaatgcagatgccggccatggaaaccagcatcacccaccagtccatccaccggttcttgtacagagccgccacgattccggcgggaatccccgccagaatggaaatagccatgcctatgacgccaagctgaagggaaacaggaaatgactggccgatcatatccgccacgctgacgccttccttcaccaaagacggtcccaggtcgccatgcgccagcatattccaccagtaacgcccgtattgaactagggagggctgatccagcccgtaactggcctggagctgctggaggacatgctccggcagcttcttttcccccatgaaggggtgccccggcaacaggcgtatcaggaaaaacgtcacggtctccagcaccagcaggaccagaagcccctgccccaggcgtttcagaatcatcctggtcaaggcgcggcctccttcccatgttcccggtcggcgtccaggctgatatcctcaaacaaatggttgtccagaagcaagggacgccacccacgcacctccggcctcttcaaataggaccgtttggcccaatacaggggaatcaccggggattcggaaagcatcagcgcttccgcacgggccagcagggccatgcgcttctcctggtctcccgtggcgcggctctccgccagcaggcgttcatactctggatgaaaccagcccgtattattgttcccggaggcggaaccccacaaatccagaaaactggaagggtccagataatccccggaccatgaggaggaactaaaatcatactgcatggaattctgcgcgaacttgtaggccgtccactcacaggaacggatatccacatgaatccccagatgctttttccacatgccctggatggcttccgccattgtcttctgaacttcgcgggatgtagtcatcagctccagccgggggaaccccttcccgccgggaaaaccggcctgggccagcagggaacgcgctttctccggattgaactccaccccatgcggcgtcttgtatccggcgccgtccggcgtaaagccgaagcacggctggccgccgccgcacaccacgtcccgcaccagggcctcccggtccaccgccagggaaagggcccgcctgacccgggcgtcatccagcggcgcacgcgacgtattcagacggtaaaaaatagtcacgtaataatcatcctggcaaaaatcatcgccgccgcgctcccgggcataagccgtcatctccggaggcacgttgttggtgacatgaagcttgccgttgaaaaacatgcgggtttccgtaaagccgttcacggtaggaagaaaacggactccattcagccggacggaggaagcgttccggtaccggggattgcggcgcacctccacataatcattgaaccggtgctccgccatgagaaaaggtccgttccctacggccgctccgggccgcgtccatccccccgtcctatccagcatgccgccgcgggcttccacggcatggcggggaaccgggaaccaggtgcagtgaagcagcagcaggggaagctggggcatcggggaacgcagctccatctccagggtataatcatccgcggcgcgcacgcctacgcgggcttcctcccataaatccggctttccggcccggacatcctccaacatccgcgccgcaatcttccgcgctccttcctccggcatcccggccggccactccatcagggaaggatcatcccgcagagcctccagctcaccggctcccatgccgtccagcctctcccaatccacccgggccaacactttctcatccaacccctcttccccggccagccgggaaccgggaccgcacagcagcaggctgcgcctgttccggttataggcttctgcattcttcagcggataaagcatgtccgcgtacctcccgccaaaccccggatgaagcaggcgatgataggcatacacgaaatcatgagccgtcacaggaacgccgtcgctccacacggttcccttccgcagggcaaaacgccacttgtccgcctccggactgtgcgtccacgactccgccacagcgggatgaaaaacggcgtcatccctggaatccccgcgcagcagcccctccatgacggcattgatcatcttgaaatcggaaacggaagtggcgatgtgagggtcaaaactctggggctccgcattattgcccacgatgagcaccccagcctcctgcgcccgttccacgcttgtgcgcgtatcgcatccggcgagcaaaagcatcacacagaacatcatgaacaggcgcatggcgggattctgtcaggtttccttcccgtgcgcaaggcttcacgtcaagaaaccggtatcaaatcctgcctttcgccactcccgtagctgaacgcgccgaaaacaagcgccgcaggagaacagcgcccctcataagccacaatgcctcctttccatcatctcttttgagtaaccggagaaacagggggaaaacaaaaaccccgcaacggcagaaaaccgttgcggggccgttttcccaaatcaagggaaaagaaaaagcagctttaattatttgccctgcgcctttttggcagcgtcaatctgggccttgatcttatccttgttggcgagaatgccggccttaatgcggggggcctgcattccggcttccgttcccggcttcaactcggccaccttatccagaatcagaacggcgccgtccacgtcaccggtggaattcagataagttccaaactccatcatcagcaactgctgctgcgtctccggcagaagcttgtcacggtcgggatacgccttaaccacctgaagggcttccgcaggcgtcgtcttgtccgtcagcttgccggcaagataattctgaacgtccttctgttcctttttaagcaggtcagcatgggcgtctgcggctttcaggccggacttatcctccttgtccagcttcttgatttccgctttcacgtcaccataaaaattgtccacatattcctgaggagccagcttgagcacttccatcagagcggcaaccttcgcttcatccgtagcagccttggcgacattcgcttccgcggcgctcagcgcttccttgttcttcagggcatcctgcatggctttcatcacatcatccccggaacgccccccgacaaatcccccaaaaggcttgccggaagcgtccgcaaacacaacggtcgggaatccccgcacgccgtactgctgggcaagtttttcattggcggctttcatttccttggactgttccttgccgcgcggataatccagctccaccagcacgaaatttttttgcgcttccttctggaagtcaggcttgctgaatacgttggcgcggagctgcatgcagggagggcaccagtcggaaccggtgaactcaatcattaaatcctttttctgttcggcggcctgttttttggcggcatccatatcggtaatccacccttccgcggcaaaacagggagcgacgcaggcggcaacaactactggcagaatttgtctaatcatatctacaatctgatattgtaaaatcggacagcccgcgtcaatcccctgttcaatcatttttagaaaatctccaaaagggtgcgtcttccgcagggaagtccgcatccggctgatgccggaaaaactgatgccccatgggaagacggtgtcattattgaagcaaatcgggagttgcctttcagcctgttttcacttatgtactgaacctatcatgaacacggttttaatcattggagcaggcggcgttgggcatgtggtagccaacaaatgcgcccagctgccggatatttttcaaaacattcatctggcctcccgcacgaaaagcaaatgcgatgccgttgcggaggacgtacgctccagaacgggcgtcagcatcactacccattccgtagatgcggatgacgtacccgccaccgtagccctcatccgggaaatcaagccgcagctgctgatcaatgtggcccttccctaccaggatctcaccctgatggaagcctgcctggaaaccggcgtcaactacctggataccgccaactatgaaccccgtgacgtagccaaattcgaatactcctggcaatgggcataccaggagcaattccgcaacgccgggcttttcgccctgctgggttccggctttgaccccggcgtcaccaatgtattcacggcgtgggctctcaagcatcactttgacgaaatccatacgttggacatcattgacgtcaatggcggcaaccatggcaaggctttcgccaccaacttcaacccggaaatcaacatccgggaagtaacggcgccctgccgccattgggaagatggagccttccgggaaaccgcccccatgagcatgcaccaaagtttcacctgcccgcaggaagtgggcacctatgaaatctaccgcatgtaccatgaagaaatggaaagcctggtcaagcacatccccaccatccgccgggcgcaattctggatgtccttctcaccgaactacctcaagcacctggaagtgcttcaaaacgtgggcatgacccgcattgacccggtcatgtacaacggagttgaaatcatcccgctgcaattcctcaaggccgttctgccggaccccggggacctgggcaagacgaccaggggaaaaacctgcatcggcaacgtcatcaccggaatcaaggacggccaattcaaggctgtgtacatttacaacatttgcgaccatgaacaatgctttaaagaagtaggttcccaggccatttcctatactacgggggttccggccatgatcggcgcggaaatgatccttacgggcaaatggactggcgcaggagtcttcaatatggaacaaaatgacccggaccccttcatggacgagctcaacaggcgcggcctcccctggcactgcgtggaactcacggaagaacaggccaaaatactgaaggtcaaccagcaataaatttcagccagcgctgtaggccccctcaaagccggacattgaatttccaatgtccggcttttccgttttcagcggggaacagaattccccaggacagcacgtcaacgcctgcctcgggaaaaagaaaaagccccggacggcatctttccgcctcagtcataattttctggcgggaagagcaggcaggttgtaaaaatccagtgccatgaaatatcttgcgttatttctcatgttcctgcttcagccggcactggcggaagatacagccccatggaaaatcgcgatcatcggcgatacgcacgactcccccaagcgcatggaaggaagcgagggagtagcagtcaacttcatcaaaaccctctatggggaaatcctgaaacacaacgtggacatggtcgtccaggtaggggacatggcggatatcgaaggaagcgcccccgtcaagggactcgccaaacgtaaggaactcaacaacattctgagagaaaaaggcatccccttttatgccgtgcgcggtaatcatgactcccttcctttccgggcggaacaattccgggaactcttccttcctacgcggaagcagggcgcccaagggctggccaccagaaaactgaactatggcatccgccataaaaacgcttccctgtatttcatggatattgacctcacccctgaccagctcgtggacttcagcgcatgggttaaacgcaacagaagcaaggccaacaccgttccgcggcactgcctggtcttcacccaccgcaccctgcagacgcccatgcaattccgggaatgcctgtggggccgttacaatgacagcgcggcggaacagcaaaatatcttttaccgcaatctccgggatgccggagtgcgcttcgtcatcaccgggcacctgcacgcccacgacctgtatataattacctccccggacgggaaaaacacccttacctccttgatctgcgcccccgcgggaaacaaggtgctccccattccctttttgccgccggcaaaatcccgggtaaaaaccctgcaataccgctccggcattacggcctactatatcctgaccatttacccggattccatgaccctggacacctacgccgcccccaataacggcattaccgacgaaggcccccaaagcggagagttccacaaattgaactcctacgcaattccgatggattagaacatacagcttcccctgtttcttccataacgcggcatcccggaatctgcctgctcccgtccgttatgcaccctggcgtccctggcaaaacaatgaaatttccgggaagtttccaatccaccatgttatttcatatgcccgaagccacgggacttgatttttctatcgtgctggcgcccccggccgcccttatataaaaactccgtttttccatcgcggcctacagtccggtcaatcaagtctccgatttcctgatcagcgtacccggccttcttaagatacttaaccacttcaccagcctgccccggataaaaacgaaccagcatctccacaaacgcaggttccaatctcttttccaaatgatacttacaattgccatttctgtcttcattagacagcagcttattgttgtaataaattgatcggggatcagcccctcgaaataaactcagttttcgttcctgaaccagtctcaaggttctttcggcactcattttatcgtattcctccttcatcctggcctgtttctgctttaattccggatcatactgagtcctgaatgttttcaatacggccgctccatattctgcccagattctgcacagctcctttctctttatgccgcatcgggaaacgattccggatatatcccaggataaactgctcatccacctcacaactccggtcttcaattcataatccatgtttccataaaggctgtctttgggggtattttcatcgtaatcccatgaaaatgtatccgccgaaactacaacataaaaaatccaggacaacaccctgacgtcttctgcgttcacatctccagctcccttggaactaaaggcaccaagtttcttccgcgcctcccggtaacaatccggcagctctttttcatgcaacagggaaagaaactccttcttttcctgaggagacgttttgaatgcggagatgctgtcgggcaacggaagccggaactgggcaggcttcccttcaccacacagaatgccggtgaaacaaacggttaaccacactattttaacgaacagattcatgatgatagtaatatttgttgcgataggttacggtatcccgatccacacaacagccgaatttggaaattgtcacaagatgatatcgctgcggcccccagatttcctgcctgtaaaattccgaaaaactgaaatggcaccgaacttccatgatttcgcagccgtcaagatgctccgttccctccccccttctccatcatggatgcgccacgaacacacccaatcccacgactgggggaaatgggaatgttccacgtctgcggcaaaaatccctcccgtgacattatcttccaattgatttgtttcagaaaccttcgccgcttcattcgcaccattcctggaatgccctggatcgaaatccgtaccgggaggcaccgagcccttgtccctctcaataattctgacatttttgaagttgacgctggtcgggtacagcgtcagcttcagaacagcggaagctccgatcacggcggtcaatccttccggcagactctccgttgctgttcctccattcttatgttcggctctgatttccgacggaatcaccacattcagtgtcgtctttacctttcttccctcactggtaatagcctgaatgaccgcaaaaccaccctgtcgaagacgttttcttgcggtcaccgtaatagacaactctccccttgttttctgaggcatttctacgtattcctccccattttcttccgctttccattcaatttcttttacattccccaacggttttcccgtcagggtcaatgttatccgttcccccacacctatcgtctttctttccctgtcagccttccggtcatcagtatttcccaaatatatatcagcggaatattcctctgtttccgtttcaatcctcaacgcgccggagtcctcttcccccacatccgcaaaggaaaaaccgcacaggaaaactgcgcaacctattaaaaggatttttatattgttaacaacaaccgccatcagacgcagatgatatcttattgccatttcccattatccaacagcaaaaaactctaacatccagcagcttttgcctgctaaaagattctgatgctcttcacgccataatacatcgccgcgcctctgttgacgtagtcttccgggttttgcgacagatccacccagaaaatgaaagaacaccacggggagggaggagagaggggaggaacaatgatttcctgcatgccggcctttttctgctccagaatcaggcggacgcgcttttcatgctgcccgaacagaagcagatgatcatgaatggttgaaaaaacacatattccggacaacgccagaaaaacagccacagttatctgcggacggggcacggcaccggggatgccgtaccacatacgaagaagggccagcacgccgataccgaacagcagggtggcggagaacatggcatggtccgccggaatgacggcggcggcgaaagaaagagccatggcataagacgccagaatatatgccgccgctattccaaagggaattttccatgcccggaaagagttccggtctctgtggatttttttccagagaacccaggcagccgccacgcccagcactgccggaagagccaggtattcatgcatccggagcaggagcgaagggagagcttcccatctgctccaaaaaccggaaaggggttccgcgcagccgggagtggcggaatgcatccgggcggaaatgccgggcgcaagcagcatgcacagggaacctgccacctgaaacgcaagacccgcataaaaccacaggggaagttttttcttccgcaccaggcggacaaagacgaacaaggctcccagcaacagccaggttcccggaatattgttttcattggtcatgcccgccggaaatcccagaacagccgcagcggcaaactttccccagctattgtttcttccggaatctccctttctcccggattccgcgtcttccagcaaaccgcggtacagacacagaaagcccagccagacggcggcgccccaggaatagttggtggcgccggagagccagtaaatcgtgactccgggccgggccgtgcacgtgaacagcaggagaagccccaatccgaacagacgcacgtccggccaggaacggggatccaccctgcgcccggaagccagataaaacatcatcagcgcaagaccgacctgcacaaaggggttgagcagcatgaataaccatttccccgccgtcgctacggcaaaggccaggtattcccctattctgggattccaggtcatgtaggaggctacgcagcgctcccagaccaggctgaaagagaagcagtgctccatgcccgtcagggcatgatggtacgtatcggaagtgagaggactccaccagctgagcagcgccgtatacaataaggcggctgcggtcagcgcccaaaaccacaccctggacgtgcggggggacatcatcagctcggatccggtttccttttccgcagtgcgggaggcaaatccaggtcttccccatcaagaatgagggggcgcacacgggcaaaaaggccgtggcccgcacgctcttcttctccttcctccggaggcaagccctcttccagttccttgatatcaggcatcgtgtctgattccaactccgcctccatttcagaactttgcgcaacaggcgcggattccagaagcgtttcctgcgcatccggcatatcggagacaggccttacaggcaccagttcctcttccaattcacgttcatccctcctggggacggggacggaaaggtccggctccggatgccgttccggttcgtcaaccggggcaggaggcgcgggctgaataatagtttttccctctccgaggaaagatttttcctccggcacaagcactgtctgcggctccgcctcccgctgaaacgcaacagacggggaaacagacggctctaccacaggcacgacgcccagcacggtcagggacaggcggtcttccggctgctgcgccacggaagcgccgatgtggaggcgcacgccccttcccaggatttccgccacaccgtccaccaggtcttccagacgctgcagcgtcagggaacctccgccgcgcaccagaaccaggacatcgtccacttctcccaaacgtttttccagaaaaagcggggaatgccggacctggttcaatatatccgccacggaagcatccgcagacgcttcacccacgccaaaggagcaaatcccttttcccgttccggctacgctgagcaggtcgtccaatcccacccggagcaggtttccggaagaattcaacagagacggcacaataagcacggcgcgggcaataagggcattaaccacggaaaaggcttccagcacccccttgtcagggtctatgaggctttccatggcgtcattatcaaaccgcagcaccatgtcggaatacagggcaagccgggccaaagcttcatccgcctgggcagagcgccgttccccctcaaacctgaaggggcggatgacaacgctgacgacataagccccctgttccttggccagacgggccgcttccggagctacgccggatcccgttccccctcccagcccggcggcaaggacggccaacgcgctgccttccagcgcacggagaatggaagactcgctttcacaggccgcctgggctcctacggaggcgtccccgccggaaccgaggcccctggtaagcctggcgcccagatgaatcttgcacggaacggatgaagcgttcaataggcgggcatcaagattcatggcgcaaacggaagctgactggggagccagcagcagcacttcctccattaccttggttcctgcggccccaatgccgcacaggcagatttttccggacaggccggacggcccctggggagagatttccagcatggttgttaatttggataaaggttgatcaggaggtcttctttccgaagaagcccagcatccgtcccagccagctgcgctgctgcggcagttcggcatccagaatctgggcataccgtatcaggcctatggccgtgcagtagcgcggatcatccaggtaggaaggcgcaccgtttttaaccagcgtaggccggctgatggccacgccgaacacgtgggaggccagttcccccacgccgcgcatcaggctggcgcccccgcacaggtaaacgccgtggcagcggttgcccttgaaagtatccttgggcagggaagatttgaccaggttgaaaatttccagcaggcgggaacggatgatttcattcagcacgttgcgttcaatggcggcatccttcatatgcccctctccgcgcacgcgcaccatctcgttggttttcccggaaaagctgttggcgtccccttccgtcttcttgagcagttccgcctgggccagaggaatgccggtcatcagcgtgatgtcattggaaatgtggtcgccgcccaggggcacgcatccggaggccacaagctggccgtcctggtaaagcacatagtccgtcgtgcccgcacccatgtcaataagcagagcgcccgcctgcttgacctgcctgttgagcacaaactgggccgtggcaatgggggcgaaaaccacatccgcaatatccagcgggacttcccgcacgcaacggaaggagttggtgatgcgggatttgattccgtggatgatatggcagtcgatgtccagggttcttccggtcaatccggcgggattggtcaggttctcctgcccgtccacggaaaagagaccgggcacgcggtgcaggacgaattgttccggccccagggcgacgtcccgggcgatttccgtcacctcgtccatatgctcctgggaaataatgctttcatccgggggaagacggaacgttccccggttgttctgccccacaatatgggctcccgtcacggacagatagacggtcatgatatccacgtccgcatggtcctgggccatattccaggcatcgtaaatgcactggatgaccttggaagtgtcttcaatctctccgcgaaccacgccctcgctaggaacctcacccacgccgatgattgtcacggtcgcatcgggcttcacttcgcccacgaccatgcaagtcttgcttgtccctatctcaagccctacgtgaatttttgtcttagccatgaaaatcaaggaactatcaacgtcctcgcacctgatagcacattactttccattattcaagaaagcctgcgcgaacatacgcagaaaacgcggttttcctccgcgctgccccggttcaaaggcctgtgggatggcgcaccaggaagtgcctggtattgcggccgtccactctccagcgggggccttcgccgcggcgcccgcttcccgtagtgtcaaaccggaggccgcagatgaccatgaagacgtgtccattcttggcataaatggaaatccagtccccggcgcctttctgcccgtaattcaggaaaagcctggaatggcgggtggacgtaagaaggccggcttccttcagcacaaaggaagtgctgccggaacagtcataatgggtatcatgatgcctcctgtgccccccgcccagccggtacggcttgttgaccagggaattggccgccgcaatggcgcgcttgacctgcgaaggggcatttctggggggaatggctttcccgttgtgaagcacggccgtcttgccgggcacaaagtggtaggcgggaagacgcgcaggagcttcaacttgttgctgggaggagcaggaagagagaaaaaggccggccaaaagggcgccagccacggagagagttttgtgggccgcaaatgtcatgagaattataaactgcggaattcccgcctccttggcaagaaaataaatttcccccgtccacattacatggtagacgggggaaagaaatcagcaatatttagccattggaacggctgtgggcatctttttccacggccgtccacagggaatccagggaagcctggactttcgccaatgcttccttcacaggatcgcccggtttcccgtgcccgaagaggtagtatttaatcttgggttccgttccggaggggcgcaccgcaaaactgcggccgtccgccagatctacgaaaatcattttttccgccggaatgggatcgccttccgcatccaccatgtcgcccttggaaaagtcccggatgccgctgacggctacgccgtccacttccgtgggaggattggaggaataggaagcggcaagggcggcgattctggccgcgccgtccgcgccttccataaccagcgattttcccatttccaaatacacaccaaactgctcaaagagttcatgtagcagttccagaaggctcttgccgatgctttccgcatacgcggccagttccgcaaagatgatggcggcggagttggcgtccttgtcccgcacgaagtcctgggccaggtagccgtagctttcctccccgccgaagacaaagtaacggctgtattccagacgcagggcgcgcgtctgttcttcgctcatcttgcggtagccctcccgtttttccgccggaatggcctgctcatatttaccgagtttctgggcaatatacttgaaccccgtgaggacgttgaccacttcataaccgaagtggtggccgatggcgtcctgaagccccgtcgtcacaaaggttttcaccatcacggcgcgggaacggttggagtcattgatgatgccaagatcggacatgctcatgcagcggtaccacgccagcagggaaccgatctggttgccggtcagcaggtgcatctttccgtcttccccgcgcacggccacccccatgcggtccgcatccgggtccgtggcgatgacgatgtccgctccggaagcatccgcctgttcaatagccagggccagagccggcggattttccgggttgggggaagcaaccgtcgggaaacgtccgtcctgcacatcctgcgccgccacggtctgcacgttgcagcccagttccttcaacaggggcacgatgatatggccgcccgtcccgtggaggttggagtaaacgattttagctccccccttgttgaaaagttccggacggagcagcacggttttcaagcggtccatgtaaatgcggtcaaaggaggaatccagcacatgaagggttccgcgccggtcttccggcaacggttcatattcttcggaagtcagggaattgacctccttgatcacggccttgtcatgcggaggcaccagctgggctccatcattgaagtaagccttgaaaccgttgtcatgggaggggttgtggctggcggtcagcaccacgccggaatccgcatgaagctcccggatggcaaaggaaatttcaggagtggcgcgggggctgtcgaacaggtaaatgtcacatcccaggtccgtgccgatttttgcgcagaattcggcaaaatcacgggaaaagtggcgcgtgtcgtgtccgatgaccaggcggggcttcctgcccgggtccgtagcctccacatgcttattcacataaataatcaggccacgcatggcccgccccacattgaagtagttcatgcaggcggtccccacgcagggatattccgggcggccgttcacgccgccgttcccctgctccgcccgggtgacgatgctgccgatggtgcgtccccgcagcccccccgttccgaaggccaacgttttgtaaaaacggtcgttcagctcctgccattccccggcggcagccaattcttctacggcctcgcgcgctatgggggatttggtaccatccagcagaaggcggatattggtccgggaagactccaaaagcttcccttctttaacggcattcatcagggattcgtccagtgtattcatgctggcggaatagtacatcatgccccttgtttgacaatagctctttccatcatggcctgagaaaaaacgccatattcatcccggtgcgggtgcgggaaatgctttcctccccgtccccttgttatttaaagggactggcggtcatacagctcccggtacaacgggcaagaggcataaagctctgcatgggaaccgtccccgacgatgcgcccgccctcaaacaccagaatgcgcgtcgccacgcggatggaactgaaacggtgggccacaataagcgccgtccttccctccaccagccggtccagttcctgctggatcagggcctcgctttccgcatccagggacgcggtggcttcatccagaatcaggatgggagcatccttcaggaaagcgcgggcaatcgctacacgctgccgctggccgccggacaatccgctgcctccgtcgccaagcatggtttgatagccgtccggcatgcctatgatgaaaccgtccgcagccgcggcgcgcgccgcggccaccacctcatcatccgtagcgtcctgacgtcccaaacggatattttccataatggtgccgtggaacaggacggggtgctgggagacgaaggcgatattcttgcgcacatcatgcagggaagcgtccctcacatccacgccatccacgcgcagggctccggaactaacgtcataaaacctgggaaggaggctggcaaatgtcgtctttccggcgccgctgggccctaccagccccactacttccccggggcggatatgcacgttgatgccgtccagcaccttgcgggcgccgtcataggaaaaggaaacgccgtcataatccaggcggccggcggcgcgtcccataggaacgggatcaacggcctccggcatggtatccggttctttcaggaggtaattgatgcgctccagggaggcataagcgctcttcaaattggtgagcgtcacgcccagccgtttgagagggtcgtaacacatgaacagggcggcggccaaagcagtgaaatcagccttggtgatgcccatttcatgcccccttaccagcaaaacgcccaggcccagcgccgtcaccatttccagcacgggaaccaggaagtgcctgtacttcaccgttctgagattgattttgaaaaaacgccggatcagccccaggaaaagatttacctgctgttcctgcattccgtaggaacggatttcacgctgggaggccaaattttcctgggcggcggccgtaatattgcccagttcgtcctgagcctgtttggacttcttcatcacgcggcggccgaaaaagcggatgggccatatggccagcgcaatcagccccagattcatcaggaccaaagccgtattcggatcaacgaataccttgtacaccaggaaggcaagggcggtcagcagagtcaggggctgcttgatgatgtcattggccgcaaccaccagccccccctgcacgttggcggcgtcattgataagccggctgatcaggtctccccgtttctggcggtcaatgaaggaaaggggcagcgtctgcaatttggaaaaggcgtccagcctgattgcttccagcactttcatgctgacgatgctgatccagtacacgttgaagaacgtgcctatgccccggacggcgaagaccagaggcagcagggagcatacggccagcagcaccgccatgcgcatgtgttccggggccaccagccgggcgatcatgtcctgaagctccgggggaatctgtgtattgtcgaataccaccggaaatactttggcaatcatcagcggaaagccgaaaccgctggcggcggcggccagagccccggcagccagagcggcaatgaacagcttcatcacgggcttcaaataccgcgcatattcaaaaaactgtcttaacatgaggcgcctccttcctcctccgcaatcatctgctgcttattgtaaagttcccggtacaggggagaagaagccatcagctcctcatgcgtgccgtctgcaaccacgcttcccttctccagcaccagaatgcggtccgccatccggatggtgctgaaacggtgggcaataatgaacgtcgtgcggccggaagccagtttctcaatctccttctgaatctgttcctcgctcttcatatccagggaagccgtagcttcatccagcaccaggatgggagcgtttttcagaaaggccctcgccagggaaacgcgctgccgctggccgccggaaagcccttcccccatttctccgatcatgcgggaatacccttcccccgtctcatggataaaactgtccacggcggacatgcgcccggcttcttccacttccgcgtcggaagcgtccggacggccgatgcgtatattatccgccacggagccgcggaacagaacgggatactgggaaaccagcgctatgtgggaaagaagatcctttttacccatctcccgcacgtcgatgccgtccacctccacgctgccggaaaggacatcataaaaacggcacagcaaattaatgaacgtcgtcttccctgctccgctgggcccaaccagggccaccacctgtccggccggaatgcggagatcaatgttcctcatgacgggagagtcctgctgataaccgaagcaaacgttgcggaactccacttcccccttccatgcctccgggctttttggattttccggttcgggcacgtcatccggagcattcagcacgtggttgatgcgttccagaccggcattaagggtttccgccttgttatggacagcccccagcttcttgaccggctcatagcaaagatacatggccgtggccagcgcggcaaaatcccccatgttcatgccgttcatgttgccaaccagcagggtggcggccatggctatggcgctgacgaactcaatcaagggggtcagcaggctctgccacctgaccgcgccgatagacgcctggatataacggcggatcctgtccctgaacagccctatctgctgctgttccagttcaaaggccctgatatcccgctgggaagagaaattctcctggagcgtggaggaaagatccccctggctggactgcaccacccgggcgcgggcaagcatttttttgccgatgtaccggatgggaatcacgcaaacgcctaccagaagcatattcgccagcagaataagaaactgctcgctgacggaggccctgtaaatcagaaaccctaacgcggccaaaagagtcaggggctggataataaggtcattggcaatctgcaccaggccgccctggagaaactgggtatcctgcatcaggcggctcagcaggtctcccttctgctgccggtcgtgaaaagccagggacaaatcctgatactttctgtacaccttgagccgcaatgtctccagcactcccagccctattttggaaagcaaatagacattgacaaaagaagacaggccgcgcaccaccaccaccagcgggagcatggccgccgtggcccacaccgtcaccaggggcaggttttccgggctcacataccacaagagcacgcgttccgcccaggggggcagcggtttcccgtcaaaaatcacgggaaacatctcctgtaaaatcaccggaatgccgaaaccgctggcaacagcggccaccacgcctccgaccacagcccacgccagcgtgcccctataaggaagaagatactcgcgccacaatgccctggcgcgcaggatggaggattcctgcccctctgttgactgtttcctcataagtattccgaatagccgcgcccgggaacggacggcgcgcaatcggcagggatcataccatgaagaccgtgaatgacaagctccttgaaataaaaactgcatgagtaaaggcatgggggcggacccccggtcatcccggcttgcccgccgccccgtaatggtctacctttccgtcgcatgctgaagacaggattcatccaaccggaaaccattcccggccactttccccgaaacctcagaaccatcgtggaactgtaccgctcctgcctggacgcaggcgcggagctcgtcctctgtccgccgctggccctcagcggcgtgcataccggtgaactggctttgcgcagcggcttccgggcccagcaccgggcggccctggcctacctggcacgggaaatagcggacgtccccctgctgctgggagcggcggacgcggaaggaatccgattccatctgttgaggaacggcctttcctttccccggcaggccgttatccctcccgccccgcatgggaacgaacgcgtccccgtctttggcatccggagaacggaggatgaagccgttttttccatcgccccgtgggaagaaagtcctccgccgcacgtttcctccacatgcctgctgctccgcacgcccgcccatgcatggcatgaggggctgctggaacaggatgaggcagaagcccgccgtacggcgcggaaaacaggtctccccgtattgacggcccgcctggccgggggagaaggtccgtttctgctgcccggcgcatcttccgtatggtccagcaacggacatcttctcaaacggctgcgtctttttgaacgggattccgccgtcatttcaccggaaaactccacaggaacggactctcccctgccctccccggaaaaacagctccggcacgccctacgcaaagggatggaagacttcattttgaaaagcgggtatgaggccgtctgcctgaatttgctggaaaattccgcttcccttctgttagcggaactattgaaggaaatgcggccctctctggcagtaacggggtttatcccctccctgcccggcattccggaagagacaagggaaaaggttcaagccttcgccggcgcggcaggcattggcgtgcggacggtttctctccctaacaaaaccgaagggctggacgaaagagctacggccgcatggctcatgcgccaatgggcggaagaagaaggagccctgccgctctcttctctaacgggaacggatatcatgacggagtcccgcttccttcctgccgctttagccgcggatttcatgccgctgggggatttatacgagacggaactggcaaacctgttccccggttttatttccccggctccggaggccgccatgcgtgacgggtttctcatccgcctgcaccggaaacatgaatccgccacggagctggcgaaccggttcccggaatcggaaagggaaatacgccgtttgcagcggcaggcccgcgcatccgaatggacacgcctgaaactgccgccccgcctcatgctgcgctccatccccggaacgcaggaaacgccttatatccatcggctggcagactgacgcggaaccttccttttcctcccgtggcatacattgcgcttgctcttgaagtggaagaagtgattagtagaagccatgcaattccatgtagcaaccatgatcggccgcgccgctttaaggctggttgaccggttggggtcaatcggattgctgctttaccaagtagcttcatgcatgtggtccggccagttccggatgcgcgtgcttgtggagcaaattgcaaaaatcggggtgcaatcccagccggtggtcatcatcaccggcgcgttcaccggcgcggtgctggaagcccagacacttttccagcttcaaacggtgagaatggaaaccatgggcggggccgtcgtcgccgtgggcatgttccgggagctgggccccgtcatcaccgggctgatgcttgcggggcgcgtcgggtccgccatggccgcggaaatcggcaccatgaaagtcacggaacaggtggatgcccttaaatccatgaatgtggatccggtagactacctggtgaagccgcggatacaggccatgcttatttccatgcccatcctgatgatggaagccgttctggtgggcatcgcctccgcgtacatcgtcagcgtcaccgcctttaacgtagaccaggcctactggatgcacttcatgagcaaattcgtcaccatgggggacatcatcgtagccctggtcaaggctcttgctttcggcctcatcatttccaccatctcctgccgggaggggctgaacaccacgaacggcgccgtgggcgtaggcaaatccaccatgcaggccatggtgtacgcttccgtggccctgctcatcgccaactttatcctgaccatgatcctcaactctttcttccccatgggattcatgagatagcctttccccgccgccatgcagccattcatccgcgtccatcagctcagacaaagcttcggcacccaggaagtgctgaaaggcgtaagctttgacgtgggcaagggagaactgatggctttaataggaggttccggagccgggaaaagcgtcattctgaaacatctggacggcctgatggaccccttggacggctatgtggaaatagacggcaggcgcatcagcggcgcgccggaaaaaatcagaaagcaaatccgcagcaacatcggattcatgttccagcagggagccttattcgattccctgagcgtgggagaaaacgtagccttccccctgcgggaggcggggatcagggatgaaaacgaactggacacccgtatctcagccgctttggattccgtaggactgctgggacagcaggaaaaaatgccggccagcctctccggcggcatgatcaagcgcgtcgccgtggccagggcaatcattaccactccggaatgcctgctctatgacgagcccaccgcgggcctggaccccatcgtcacggacagcatcagcttcctcatccggcaaatctgcaaggacaaaggcatcaccaccgtcattgtctcccatgacatgcccagcgtgatccgcatcgcggacaaaatcgtctatctcagaaacggtgaggtttactggacgggaactccggaagaactgttgcactcccaagacgaaatcctgcaaaaattcctgtacggggactccggggaaaactgggcggccctgtccggcaaaaatgaaaacttccaacgggttctgctggaacgggcggaacgggaacgcaaacaataaccatcttgccacagagccatgaaacagaaacttaaaccggaaacgtgggtaggcatctttctgatcgccgggatcctgatgattatcggagtcatcctgggattcggcaacatcaaaacatccaaggaacaaacctaccccatcaacatcattttcaaagatgcggcggggctcatcaaggattcccagatccgcctgggcggcgtcacggtggggaaagtcaccaaagcccctgaactcctgccttccggcaatgaagtcatgctggaagccaacatcctgagcggcgtgaaaatccagcaagggtccgtcttccgggtggacatgcagaacattctgggcgacaaatacatcgatatcgtccctccggcccagcccacgcatgaatacatccttccccatgccaccatcatcggtcagccggaaagcgatttcagcaaaatcaaaaacaatgccgtgggcgccacagaggaaatcctgaaaatcctcaagcaaatcgagaaaaattcggacaacattgacgacgccatcctcaatatcggagaggcggccaaaggtctggcccagacgaccagactgatcaacgagggcatcctgaaccgggagaacctccagaacctcggcagcgtactgtctcaaataaaccgggcgggagaacagctccccggcctcatggaagaaacgcgctcctcggtcgcagccatgaaagacaccgtccgggatgcccgcaaactcattgccggagctgaagaaaaactcaacactctggaccccgccgtcaaggcaatcccccctacgctggcctctctgaggaaagcatctgaacaaatctcctccttcacggctgatgcacgtaaaaaccagggctttcttgggctgcttatgtacgatgctcgcttccgggccaacgctcaggaattcatccgtaatctgagggattacggcattctgaggtaccggaatcctaacgaaccccaagtcaaaccggatccccgcggcggtttttcaggaagccgccgctgagagaccgcacaattccgggtgaagccgctttacacacttgccaatagtgggaagcgtgctaaataatttccaatgtgagaggcgaaaacatgtaagtcgacatgtttttcaacaggaaccaacccttaatactctaatcaaccatgcaagacaaccaaaccgaacttgaaacgaccgcagcagcaaacgacacttcctgctcctgcccttccgcccgcgagcttgccgtcaccagatttcaacaggccagggccttcgccgcagctaaagtaaaccaaatccgcaaggcggctacggaacaggccagcaccatctgcgactacgcccaggaaaagggagaagtcatccgtgacaaggccaagaagttccacgaagcaggcgaagaatacgtgaaggaaaagcccacccagtccgtgctgattgccatgggcgtgggccttctcatcggtctgcttatccgccgtcgttaaccctctcccttcattccgcgccatgcgtgccatgcgcatggcgtcctcctccccctttcaaaccgaaccatgggactgatcgacaaactcaagcgaaccttcgtcaccccccttgtggaggaaaaggaagaagggatggccatggtccggtccctccgggaaaccgggacggcagccctggcccatgcggaagccctggccgcactgctcaaactggaactgaaggaagcgtccaacaggctgggcaaaaaaacggcctttctcctgatgggcgtcttcatggccttcttcggctatctatttctgtggtgccttctgactgtggtcatggcgtatttctggggaattatcgccgggcttgccgtaaccacgggctttcatctcctggccgccgcagccgggttcatccttttcagccgaacccatgtaacgcctatcgctccggcgacggcggaagaacttaaaacggatttatcatgtctgcaaatggctctcaagaaaagctcgcactcctgatgcgggtagcttcctcccggctggacatcgtcaatgaggcggacagcctggtgcaaaagacgcatcagcaggccgaccacttccgtaaattgaaaaaaaaggccatgtccctgcctgtaatcggctctattgtcggaacggtggcaggagttcttctcatccgcatgtttgcggggaaaaaaagcaatccggcccctcccccgcagccgcgcacttccggaagctgggttaattcctccatcttccgtttcatcgttgaaattctgattaccctggctttcccttccctgaaaaaaatggggatcggcctggccggcaaaaaaattcctcaatctgttcaaataacaggcttttcaggccaatacagcggttttctgccgcttcttgaaaaaggttcgggaacccagcagccgtaaaaaaatggggatgttcctgcggcgttaaatgacgagccgccccatatccttcctgccttccagggaacaataaatcatgcctggcgtaaaaagccggcctaccgcgccaatcccctgttccatcatcctctccttccccggaaacaaacgtccgcagatcttccgcaaaacttcccctctcgaaattcctcacccgtcgcggaacagggcaaagtcgctttcatggaaatcggttcccagacattttttgctggtcaaaaaagctctgttttcgttagtatgtagcttcatcagtttgctgcattcacaacatgagcgaatacattttgccccacgtcgacggatatcttaaacttggacaggattacgactgttccgatatccaccttgccgtcaacagccgtcccacctggcgccggttcggccagcttctccccatctgggaggaagcgcccaatctcacgccccaggacacggaagtgctggcgaggggctttctggaagacccggaatggaaccgccttcagcaacggggggacgtggacttcgcctacgccaatgactttggccgttaccgcgcatccgtggttaaacagcgcctgggttatgacatctgcttccgcatcatcaacacgcgggtgcgcaccatggaggaaataggcctgccgacggaatacgtggtgcccctcacccgctacaccaacggtctcattctagtcacgggttccgtaggttccggtaaatccaccacgctggcctccatcgtggacttcatcaaccaggaccgccacgaccacatcatcacgcttgaagaccccatcgaatacctgattccctccaaaaactgccacgtcaaccagcgtgaagtgcataaacacacggaatctttcgcccgcgccctccgcggcgccctccgtgaagacccagacgttatcatggtgggtgaaatgcgcgacctggaaaccatctccctggcgctcacggccgcagaaaccggccacctggtgctcggcacccttcatacgggctccgctgcccgtacggtggaccgcgtgctggacgtcttcccggtggagcaacgcgaccagatccgcatcatggtcagcgaatccctgcgcggcatcatctcccagcagctggttcccagagcagacggcaacggccgcgctctggccattgaaatgctggttaatacgcccgccatcgccaactgcatccgtgaaggcaagacattcatgattcccggctgcatccagacagggaaagcccagggcatgatcctgatggacgactcgctccgggccctgcaccaggcaggcctcatcaccacggaagactgcatcttccgcgcggaagacaaaaccatcatgaaatccttcctgggaatcaagtaacctttaattttgaaacactcctgttatggctgtcatcgaccaatacttcaaatatctcgtagaagcgggcggttccgaccttcacctcagcgaaggccagcctcctaaaatccgcgtcaacgggaccatctccgccatctccgacgaaaacctggaaggccaggcattcaaaaacctccttgcggaaatatgtgatccccaggccttccagaaatatctggaagaaggggacctggactttgcctatgaaatggatgaaacatcccgtttccgctgcaactatttcaagcagcagcacggcctgggggcagttttccgtctcattcccaccaaaatagccacgctggaagaactgggcgtgcctacggtcgtcaaggaattcgcccacatgagatccggccttgtgctggtcacgggccccaccggttccggtaaatccaccacgctggccgccatcatcgactacatcaacagcaaccaggcgcggcacatcatcaccgtggaggaacctatcgaattcgtccatcccaataaaaaatccatcgtcacccaaagagaagtgcctctccagacgccttccttcgcagacggcctccgggcctcccttcgtgaagactccgacatcgtgctggtgggtgaaatgcgcgacctggaaaccatctccctggcgctcacggcggctgaaaccggccttctggtattcggcaccctgcacacgaacaacgccagcaaaaccattgaccgtatcattgacgtattcccatctgaccagcaatcccaggtacgcaccatgcttgcgggctccctccgcggcgtcgtagcgcagctcctgatgaagcgcagcgacaaaccgggccgcgtggccgtcaatgaaatcctctttgccacgccggccgtggctgccatcatccgtgaaggcgccacgcagaaaattcctgacgtcattgtcggcggcaaggccatgggcatgcaattcatggatgacgccatctggcagaaactccagcagggcatcgtctccccggaagaagcctacatgaagtgtattgaaaagaagagattccgcaacttccttcctccggaatccgcccgcctggcagactccggcggcggaaactaagctctttgccctccttctcctgccatgtctcccactggaaaattcacgctcaggcttgtaatttatggagccttcctgctctatctggtgggggacctgtttgtctggcacggctttctggccggcagaatggacgcgtacctgaaaccgttgccggggccgccaggagacaactccgcccggatagcggaagtgtacggggaacccgtcaccgccaaccagctttctcgaagaattacggaactgaaactgctgcgccagcctcccgtgctggatatggaaggcgggatcaaacttactcatgaactggacgtccccggcgacctggctccgcgggccaggtatgacctgatcggctcctcccttctgcgcctgaaaaccagcgtcaatgacctccagctccccaaccgcaacgcggaagcggcacgcgccgtggaacaaatccggtcccgttttgacggagacacggaacaatacctgaaaaccctgcatggccagaaattgacgcaggaacaattgcaaaaaaaaatagcggccaggctcaaacagacggaacagctctaccgggcaaccgcccaggcggcggaagcgtccgacgaagacctgaaaacctactacaacctgatccgggatcagctcacccctcctgatctgcggaaaaccaggcacatcttcctggctaccctgaacagggaagaagcccaggtccggcaaaccgcagaaacgctgctggaacggctgaaggcaggggaatccttctcccggctcgccagggaattcagtgaagacgaacgttccgctcccgcaggaggggaactcggctggataaaccccgcccgcgcaaaggaaaccctgggtctggcgttggcagacattccggacgacaagccggcgcttctcaaaagccggtgggggtggcaccttgtggaagcatcccctgttaaaaaaggaaaaacgccatcctatgaagaagcgcttccggctctgagggatgcaacccggagcctcagaaaagctcaagccgtgggattgtacatggacggcctttttgaagaagcccatctcagaaaccgcattaaaaacaagcagggccgctgacgctccaattccggtaaacgggccttcgcaaaaatcggaaacatcaggcccgcctgcctttactcctgaacattcccgcagaccctctggctttcagaccggggcgttcctccttttccgtaaaagccgggcgttcccggaaatagccatcttccctgcggtcagcttccggcagtcatgaaacacccgcacgagatgaggaaaggcggcaccttccttcttatttgcctttcctgacgaattccgcttgctttcaaacgcgggatgaactaaattctttccggtatttcccacggggtattagctcagttggtagagcgtctcgttcgcaatgagaaggtcaggggttcgaatcccctatactccaccatccatctctctttcccgccactgttttttattcgggaataacgggtagccctatgaatggtaacttatttaaaattgtactggtttcagtcgttgccattcttctggccatcataggcggcatcatgtcggcggacggcgatcccctttctatagttctggctgtttccccctttatcctggccgccttattcctgatgaagggaaaagtgtggtatctgtggatactgatacccattcttttcctgcccatcccctctttaagggattacgctcccctccttgcttacggaataacccttccttgttacttgtggaacgccatgctcaggcgttcaaccttgacgtggaattccgccccccttctggacgctgtcgtcctcgtgctgttcatgcatgtgggctacatcttcctgagccaccctttcgctctggggctggatgtgctggaagactactacggaggcaagggatacatccttttcctccaggccctcctggcctatccctgcctgtcctcgttaaaaacgaccagccatgaactgggcaaggtgcttcaatgggctgttttcctgaccatcgtttttacccttatcctaaccgcccggagcctcctttctccggatagcgccggggcggatcttgccgcgaacgcgggctccgcaggcacactctccgaaagctcccggaactcttccttcctcagaatttctatcttggtgatgcagctgctcatcatcaactactccgtgtggcagatgatcaaacgtccctggtggggggcgctgcttcttcttggaaccgttggcatcctgttaagcggattccgctccgccatggcccaggttctgttcctgttcttcaccatatccctaatttacagaagatggttcttctgccttctggttcccgttctcggagtgcttttgctcttgctgctctcctctgcgggtatgctccattctctgcctttcggcatccagcgcaccctctcagccgttcctttcctggacgtcagcgagcaagccaaggcaaacgccgaagactccatcaactggcgctttgaaatgtggagctgggcgctggatgaccgtgaacactttattcagaacaaaatattcggagacggcttttcacgggatatcagcatcgtgaaagccaatgtgtatgaagaagcctacaacctgagcaaagaccaaagcgcctttgcgtggaacggccaatggcacagcggccccatttccacgattcaaacgctcggctacatagggatttccctgtaccttatcctgtccgtcgttggcatgacctacgcatggatcgtcagtaaaatttaccgcaaccatcagtacaagctcggcatcctgtatgtttccgccgtctatttcaccaaaccaatcttctttttcctgatctttggggaaagcatcaccattgcgatggacatcatatccctggccatcatcaaagtactctactcctgcgccaagagggagggcctctatgtatccctccatgtccgcaaggaatacatgccgctcatgatccggaaaacgcagcaaaaacggcaagccgccgcaacggcacccatttccgactgactgttccttcccgggaaaaacaggcgttccctatgcttgaggctggactaattcaaagggagttgctacctttcggggcggttccttttcccatggcagcagatacttcccatcatatcatcggcctcattccgtcacgctggggttcctccagatttccgggcaagccccttcatcccattgctgggaaacctcttgtccagcacgtatgggaacgcgtctgccgctgttcccgcctggacgccatcgccatcgccacggatgaccagcgcatttttgacgccgccgtatcctttggagccagggccatcatgacctctccggaccatcccagcggcagcgaccgcctggcggaagcggtacgttccttccctgccgccacccatgtcgtcaatattcagggggacgaacctctcattgacccagccctgattgacaggctggcggaagccctggtctcggacgaagccctctccatggccaccgtcgcctgccccatcagcgctcaggaggacctggacaacccgaacattgtcaaagtagccctggcccgtaacggagacgccctgtacttctcccgttccgtcattccctacgcccgccatccacgcgtagcgccacccttgcgccatctgggtatttacgcctaccgccgcgactttcttgaaaactatgtgcgctgggctccgacccccctggaacagacggaatccctggaacaactgcgcgcactggaaaacggggccagaatcagggtcatcctgacggaccacgtcagtgtgggcgtggatacgccggaacaggcggaacaggtggaacaaatcttattaaacatacactaggaagcaaatcatgaaatacatcttcgtcacaggcggtgttgtctcctctctcggcaaaggactggcggcggcatccatcggcacgctgctggaacgctgcggacttaaggtaacccttcaaaaattcgacccctacctgaatgtggaccccggaacgatgagcccgttccagcacggggaagtgtacgtcttgaacgacggagcggaaacggacctggacctgggccattacgaacgcttcgtccattgcagcctctcccggctaaacaacctcacttccggacaggtctttgaaagcgtgctgcggaaggaacgccggggagactatctgggaaaaacggttcaatacattccgcatgtcacggatgaaatcaaaaaccgcctctatgaagtcacggaaaaatcagacgtggacatcatcatcacggaaatcggcggcacggtcggggacatggaaggccacattttcctggaagccctgcgccaattcgccctggaagtgggccgtgacaacgtctgcttcattcacgtcaccctgctcccctatatcaaggccgccggggaaatgaaaacgaagcccacccagcaatccgtcgccaagctccgggaaatcggcatccagccggacgtgatcatctgccggacggaatacgacatgagtgaagacgaacgccgcaaaatcgccatgttctgcaacgtggaagccaaaaacgtcattgccttccgcgacgtcaaaaacaccatctacgaatgccccctggatctcagccaggataaaatagaccgcattgtcaccaggcgcctgggactggacgttccggcgcccaatctggcggactggcagcgttacgtcggcagggtcatcagccccagccactccatcaggattgccgtagtaggtaaatacatcgctctccaggacgcctacaaatccatctatgaatccttcactcacgccggtgcggaaaatgacgcccgcgtggaaattctccggatagacgcggaagaaattgaggaaaagggcgcggaggccatgattggctccgtggacggcattctggtgccgggcggctttggagaccgcggcattgaaggaaaaatccagacggtggaatacgcgcgcaccaaaggaatcccgttcctgggcatttgcctgggcatgcaggtggccgtcattgagtacgcacgccacatctgcggcatggatgacgccaactccacggaattcgaccagaaaaccacccacccagtcatcagcctccaggaagagcaaaaaggcatcaaggccatgggagccaccatgcgcctgggcgcctacaaggccctgatccggcccggaacgctggcgcacaagctttacggcaaggacagcgttacggaacgccaccgccaccggtacgaattcaacccggcctaccgcgacgaactggaaaacgcggggctggtcatcagcgccgtcaatgacgaacacggactggtggaagtcgtggaacttcccgatcatcccttcttcatcgcctgccagtaccatccggaattccagtccgctcccaaccgggcccacccgctcttttccggcctggtttcagccgcgctggagcacaagagccactcctgaccctttcattaagcccggggccttttccggaatttccattccggaaaaggccttctctttccaggcatgctcacggaccttttcgtcatcgtcatttactttctggctatcttctgcattggcatttatgcgggacgaaagcaaaactccctgacagactatgccctgggcaaccgctccctgccctggtgggctattctggcctctatcctggcggcggaaatcagcgcggccaccttcctgggggctcccggagaaggataccatacccgcaacttcacatacgcccagctctgcatcggcaccatcctgggccgcatcatcgtcggcaggctctttctcaagccctattatgactacaaggttgtttccatctatgaatacctggaaaaaagattcgggctcctgacgcggcggacagcctccatggtcttcctgatcagccgggtgctcgccagcggaaccaggctctatttcgcgggcattctgctggtcattgcctaccagttcctgacaggcgtcacggcagacgccgaccagattgtcctgctctacattgccgccctggttgccatctccgtcgccacgacaatttataccgcgatcggaggattgaaagccgtcgtctggacggacgtcctccaggccgtcgttctgggagtctccatgctttccgccctgtgggtactgttctcccatatccccggagggtggagctccatctccgccgccatgaatggtggagacgattggaaattcttctcctggggaaccggagaaggcctggacttcctccaacaaggcgcccgcgtgctgggccaggaatacacggtgtgggcggccttcctgggagcaaccttcatcaccatggctacgcatggcacggaccaggacatggtgcagcgcatgctggcggcaaaaaacagcaaggcgggaacgcgtgcagtcatcgtatccggcttgctggacttccccatcgtcatcattttcctcttcacgggcattcttctctatgtcttctaccaatacaacccggcaaacctccccgccgacacgccgcagctgcatgtgtttccctacttcatcatccatgaacttcccaacggcatccgcgggctgctgatcgccggacttctggcgacggccatgggctccctctccacggctctaaactccctggcgactaccgccaccaaggactggtaccaggggatattcaaaccggaagccacggaacggcagctgctccggtgcgtgcgctggggaacggccgttttctccctgctgctcatcctcgtgggttccatcacagcgtggtatgtggtgcatcacccggaagtccgcatcatccaaatagccctgggcattttcggctatacctatggctccctgcttggcattttcctgttgggaatgctgacccgcaccagaggcagcgactcaggaaacatcattgccatggcggcaggattctttgtcatcgctttactgacggaactcatccctctgccctccggctggcaacaatatgttccggaaatagcatttccgtggcgcgttaccatcggaactctggttacttttaccgtcggcttctgtttcagaaagcgccgccttcccatgcgctgaacggtgaacgccgttcccccccccggccacattcaggttccgcattccccttcaaacctcccgtcaatgggagtaaatgtgcaagcgaaaaataggggattaggggataaaaatccctgagggggggcgttccctgtccaacggatgcgccgaaactccttctcccggacgcaaaagcgccgctttcccggaaagggaaagcggcgtgaaacggaatggaaacacgttccctccgctacacttcttcgggggacagccagcggaaggaaacgatgttgaactttcttccaaacgccttgttcacggcgctcagctccgtatcctccagcgcgccgctcttcatgttgacctgccgggccggagtttccgggctgttcaccggatccacgtagttgatccccctctgcaccaccgcttcgcaccacgcgcgcgacagcaccaccccttcgcggttggccagctctccgtaggcgcgcaccgtaaacgtatcgtccctcgtcgtcaggatgttgcccagaaccgccagcacgtcagactggatcaggtagccgggggcggccgtatacaccgatcccctggccgcgtcctggttcgggtagcctcccttgggcgcgatcaccatgtcggaaagttcgtcaaacgtgctgttgatggagctctcgtcaatagccgcctgaagcgctcccttcacccccatttccccgctctgcaggcggcggttgacaaagtcggacatgttcaggaaggggcctctctttttgacctccttgaccatgttccgggccagggacctgatttgggtgtcgctcagggttctcaggtccgaccacgccatggcctctccgtccgggatgccctgggtcacccctatcgaaccatagtcgtccacgtgggacttgtcgctgctggccactccgaaacgggaaaaggacgtctgggagttgttgagcacggagggcctcccgtttctggaatagagaatcttgcgcttcttgagccccagcagggtggcttcccaggcgcgctgggaggtggagttgacattgaatccgccggcgacggtgaggtacttggaggcctgcttgtagccttcgtccgtcctggcgagttcttcgacgacagcctccgagggtttgccctgaaggtcgggcatgaagcggcggttggcgatgcctgaagccctgttggaggaggcgtccgtagagaaagcctgctgaagcacggttttaagttcttccctgcccgtgcccccaaggctggaagggcgggcggccagggaggaggcgaaccaggagtcccagagggcgtcgttgatcatcaggccgtggtcccagaagtcccccagggcggcgtcccccatgatttcgttgtgggagaaaaccttgtcggcaggaagcatgggatcggcaaaagcgttgccgatgcctacgcccggcacgccggactggtaggcgaagcgtttggcgatggccgccctggagtcgctcctgtaccatcccggggtgaggcggcatccggcaaagccggccaggctggagggctgctggaagggaagctccgcggcgacaatcttgttgacctgctcggctcccggccctccgaagggggagagcctggtgccgtcattggagaggatgttggagatggtaatcgggaagaaatcactgttggcgttcttgacttcaaactggtacgggctgtagaggcgccccagttcggaggcggtgggcatctggcctccccagaaaagggggctggagtgctgccatgtcttggcccggtagtccttgccctccggataggctcctatcacggggggcttgccccattttaccgatactccatagtaggcgacaaacgtggagtccaaagagggcgtgccgtattcgcccgcttttttagcttcttcattggtcccttcgttgtgttcccacatttctgcgggaagtttaatttggtcaacaagaggtttttcccaagcaccccagttcaggttgaggatggccggcatggtcttggagaaaatttctatttccgccgtgcttttcccattcagggaagaggaactgttcattttgttgggatccatcaggccggcccccatcacgaaggttcccagggctttggaggcacccttgtctccgtatttgacggcgagaacatgattgtccggcgttccgttgagccggctggtatcttccgcgaagataacggaagccttggcaatgcctacctggttatatccgctgccgtccagaagttcataacggacgccgtccgtcaggttgacggcataagagctgacttgtcccggttcctgggaccatccctctttgagcgggaatctgtccggtttgaaatcaccgctgttgggctttgttttgtaaacttcgttaccgttggcgatgttggaaacgaccggctgggcaaagacgatgatctcgcctgctttcaaggtggaaggctctcccttgacggtggaaccgtcactgttaagtttggccgtagttcggaaagaggcgccgaaatccgccacctggcggttgttataagaagcgttcaaataggggatcaggcaggattctccataattggagagtgcattctcatccagttggttccatgcgaatttaacattatgggaaagcagcaggggcatgaagcggtgctcgccgaagtaggcgccccagacacctccgttggccccggtcagcttcatatccacattatacggattccaccagacgtacacgggaatgacggcaatacggaagtcgatccatcctccacggttgggatgcttgttgccgtgtttgacgtagttaagtcctacaaaggaataaaagcgcagcaggatggggtggcgcatgtacgtgtagcggttgtccatcatttccatgctggctgcggagtccgccgcaatcagcgtgctgggagcgcttccattccattgaagggtggcggaggcatcctggccttccctcttcgtggaggagtcccacacgttcgcccacaggtaaagctggttccaggagccgatcggccggttctggtccgacgggttgccgtcctcggacgtgtacggacgcaaccctatgtccgccgtatcgccgcgaaattcttcaggaagtttttcctgggaaaacataatgttgaggtctttcttaagaccgccgaatttagaatccgtcagcaaactggaagaaaccagagagatgtcgtggtaaacgtcacccaaatccttcaaacgtccgtttttattgttggccagcagagaatcaagagagataagctttctgactgcggacatgtcgttcccggatcccgccgtcattacggaagaaagattgagagactccagatcggggccgggcgtatcccaggtggaacgcagcaccgtcagggcatccgtactttcttcagaagcatgcggcatcaaattgatacgcgctttctggttttcccccgtgacccaccaggctatatatttacgggagttagcattctttttcagtcctgtggtcttggaggaatcatctacgcgcaccatgcgggcgtagatttcctttttatcctgattcctggctccaacgggtgtccctatcgtgcctggtcccaccagggcgacgctgcggaagttctggttagagagagaacgtttgcccaacagatttttacccgcttccagagaactgagcctgcgcaaatcagggtcggaaatgagccagcggcggaacatggattttcttcctgtatcataggtggccgagatgttcataccctcggagttattcgtattgagccaggaatcccagctgttccagacacccagaatataaggggcgtttccttcgctggttccggaagaaagaatgccggaattggcggaaacacgctggtcagggcccaattcacactgaagctggcccaaagctacttccagggaaaatctggcgagggatttggcctccgccgcaaaaagctgtttctcggaaatacggacctgtgaagatgcaatggttaaaaggccgacgctgaggagggctaaaagcatcatcagggtaatggtggcaatcagggcaaaccccttgctgacatgcctgacaggacgtttagtgaaaagtttgatcttcatgaaaatgatgggtttcggcaggcccctttccgttcgagtgtgaggaggaaaaacctctgctgtcacaaaggtgcgaagagccaattcttaactctagccaatacaaaaaagaggcagttcatgcaagctcaaagttggttcaacagggcacacgttgagcagagcaaacaggctccgggacaattggaaagaaaaataaggcaagaaaaatcgcatttttatccaattccgttcttaaaggtttatattatgatttttatagaaaaatcggattctaaattcggtggattaaaaaaagacttgaatatcatattttctcaagaaaaactgcctgcggaatttcgtggcgatacggcggacatagggttgcgtccgtacacgtccgaggacggcaacccgtcggaccggaaccggccgattggctcctggaaccagctttacctctgggcgaacgtgtgggactcctccacgaagagggaaggccaggatgcctccgccacccttcagtggaacggaagcgctcccagcacgctgattgcggcggatgccgcggcgaacctggagatgatggacaaccgctacacgtacatgcgccatcccatcctgctgcgcttttattcctttgtaggattgctcctgacaaatcaccaaaacaaaccgctcaatgatcttttagatgcagatggaggatatcacgctagaacaggaggcgggtttgttgatgttaatttggccattatccccgtgtacgtctggtggaatccatacaatgtggacatgagcatgcaaggaggagatggttccccctggggagcgtattttggagaatacagatttatgccgttattaactagcggtaattttgatgtatgcaatatcggaaaaagggaattttacggtataaatgagtcttggatgaaggatttgacgagaaagtatgaacacccgatgaccccgtacaatcgaaacagtcagggagtgtggaaaagatttggaatgcggcaaattgcagattttggagcatcattcagaaccgatacggctattagcaatgcttccataaagaaaggcgctattcctgttctaaaatcaggggaaatagtcattttttcccagccggtagcttcatacgaggatattattacaatcaaaagagataatacggatagttatgtggatgggttgccgtttaaggaaggatggagcgcaaatccctcccaggtctctccttatgctgtggaatggaaagcagggttactctataaaaatctgtccgggagtggctgggaaaatgaaccttactccggactatccaacccaataggaacagcaacagcaagtattgactttgctcaatcttatgaagaaatacaaggtacatatttagacccagaaggggataaaacccctgaaaaccatattctggctgatagatttacagaaaatcatgatgcccattctaataaattgggaactttcgtgatgggcgcaggcttaatgaatatttccgggaatactgctcccatccagttgcaaggaagttctacggaagaacccaaggcttttgagaaatatatgcctgccgttcttaatttgaattggggtgtctggcaaaagccccttgtcgataaaattcttatcaaagcggtttattacaataatcctggcaatcctgggcaagagaatgggcaaaagttcaaagaatggctccaaggcaaagagggagaacctgacaaggatcctgaatttgtcgcctactatggagtatcggtaaaatggggcaagccccccgtgataggagcctatccggagggcaaggactaccgggccaagacatggcagcactccagcccccttttctggggaggccagatgcccaccgcctccgaactggggcgcctctacagcccgtaccagtttgaagtcaagaacgccaacagtgatttcttcccgattaccatctccaacatcctctccaatgacggcaccaggctctcccccttcggagggccgggagccgagcaggtcaacaagattgtcgccgcggagcttcccttccagcagccctccagcctggccggctttgccggatgccgcctcaccccgggatggtacaggagcgactccagggcggccatcgccaaacgcttcgcctaccagtccggcgtgccgggcgtaggcatcggcaacgcttttgccgatcccatgcttcctgccgacaaggttttctcccacaacgaaatcatgggggacgccgccctgggggacttctgggaccacggcctgatgatcaacgacgccctctgggactcctggttcgcctcctccctggccgcccgcccttccagccttgggggcacgggcagggaagaacttaaaaccgtgcttcagcaggctttctctacggacgcctcctccaacagggcttcaggcatcgccaaccgccgcttcatgcccgaccttcagggcaaaccctcggaggctgtcgtcgaagaactcgccaggacggacgaaggctacaagcaggcctccaagtacctcaccgtcgccggcggattcaatgtcaactccacctcccagcgcgcctgggaagccaccctgctggggctcaagaagcgcaagattctctattccagaaacgggaggccctccgtgctcaacaactcccagacgtccttttcccgtttcggagtggccagcagcgacaagtcccacgtggacgactatggttcgataggggtgacccagggcatcccggacggagaggccatggcgtggtcggacctgagaaccctgagcgacacccaaatcaggtccctggcccggaacatggtcaaggaggtcaaaaagagaggccccttcctgaacatgtccgactttgtcaaccgccgcctgcagagcggggaaatgggggtgaagggagcgcttcaggcggctattgacgagagctccatcaacagcacgtttgacgaactttccgacatggtgatcgcgcccaagggaggctacccgaaccaggacgcggccaggggatcggtgtatacggccgcccccggctacctgatccagtctgacgtgctggcggttctgggcaacatcctgacgacgagggacgatacgtttacggtgcgcgcctacggagagctggccaaccgcgaaggggtggtgctgtcgcgcgcgtggtgcgaagcggtggtgcagagggggatcaactacgtggatccggtgaacagcccggaaactccggcccggcaggtcaacatgaagagcggcgcgctggaggatacggagctgagcgccgtgaacaaggcgtttggaagaaagttcaacatcgtttccttccgctggctgtcccccgaagaagtgtagcggagggaacgtgtttccattccgtttcacgccgctttccctttccgggaaagcggcgcttttgcgtccggagagagggggaagatatcagggcagaaaggacgaaagacgattttcccctgttccggggatagtggggctttcttccttttccccctgccttggacatctccgggagtttcgataagcccggaaaaaaccggatcgacttattgaatacggagccgacgtttatttccttttaagttcaacaagagctccgtaatgcaacacatcaaattcggccggggcaatttcaacaagcagtttcatatgctcttgttcccatacggccgttttcctgaaatccagcccctaacctgcatgaatgatctgcgccgcctctccgcgcgactaaccacaaaccttcttatccgcgcggccgccggccaggcatttgctccaccacgcatggataagactgacatttgatgatgctccttgcctatatcctttccttaaaaaagaaatcccattgtctttaggaattttatcccaggcatccctactttgagcttgcacggacatcttcattcatgtacttcacaaaggatatcaaaactattggaaccatcagcacacgctgctgcacggttcaatggattttccctccgcctttttcccgcgcggttatcctccaagggtcactgccggggaaaccaaaacactcttttcctcattccacttcccaaaatatatgcgtattttacccatcctggcctttacctgccttttcggaagcatttccttcgcccaaggacaaagccgcaccccctccaggccggaaccggcccaaccggcagcaaatgctccggcggccgatactgtggacaagtccctgccgccagccgccgtcaacggcatccggttcgttctgaaggagcccatgtctcttccttctcccatttacatgcctattgattccaaaaggctggaaaaagtggaaatccgcgccgcccttccgggacgccgcagcgtttaccccaggagcaagatcattaccctgttcgggggcctggaccagaaaggcatgccgaccaataaactcgtcagcaagcccctgccgcccgatcttggctccaaaaccctggctctggtcggcaaaaacagcaaaggggaattgacgctggattttattaatgagtcggaactgccgctgaactgcgtttacatccagaacctgaccggacgcacgttcactttggaacttcccaaacctccctcgggagaaaagagcgctatcgaactgcccagcaaatccacttacattttcggcaagaactccacagacagcaacatttcccgcaccacccccgccaatttgacgtacatgacccgtttaaagaacggcaaagtcgtcaaggtgaaggacagaggcatgatgctgacgacctacccgggacgaaaagtggttatgattatttccccggattccaccggccgcaccgtcgttttgacggaactgatgattttcaaggaaaggccgggggcggcttcctctgacaagtaaattttcttccgatatccgggaagccggaagttgctctggagtatatccggatgattcagaaaaacgggcattgctgcccgtttttttatttttcttctcctgacgccatggattgagggaataaaccactccggacatttttccggcacgggaacaatgtccaccctgtttcccgcggctccaatgcggcaggcggagaaagaggtctcgaagccatgcggcttgccgaaaaagttcacctgccgccctccggcatccgaacaggcttaataaactttgggcaccagaccctgacggctcatcttatcttccacttttcgccggttttcctccagacgccgggcgtcataggaatcatccacaggctgggcctccggaatgttttctccgcgtcccgccttgtattgctgcacctgcgggagcactccttccaccagttccctgcatatccaggaaggcaggatataggtctccgtgcgtccggcccggctcagagccagcccaacaaattttccgttgacgtcaatgaccgggcatccggcccgttccgggaacaaggtcatgtccgactggatgaccaaagggaattcatcccttttcaggctcatccggttgcccatggagttcatcatatcaaggcgcttttgcgggaatttcatcactttgggcctgggccccgtgaggagttttccctccactacttggttccgccgccttacttccacgggaaccgtctcaccgggacgcaccccgaccatagcggcacggatggagtacattccgtccaccggctttccattcagcttcatcaacacatcaccggccatcaagccgctgcggtgcgcgccgcttccggcttccacgccgcctatcatgaccccctccccgtcccagcggggatcggaaacgatgccgagataaggctggtcatccgccctcaggctgcgctgggccacggaaacgactccgaagtcgctcacatgccccgtgggcgatacggctgcaatcacgtccccttccttcgcctgcacataggaattcaagtcaatgggaggagcgggaagccccggcacatccatcatcagcagatcatgctccggaagggcaaagagcaccttggcgtcataaacccgcccggaagaatccaccagcatgaccggacgccgctccttctggagatcactcagcttggtgaggacctttcccttccccacaaccgttcccaaagccacctgggtattgccggcaaccagcgccaccacggactgccccaccggaacagccactttgtcccattcccggaaaatctccttggcctggctgtccagcacgcttttgtcctccggcgcaatcatctggtccggaggcaggggagaagctatttcctgggcacacgcggaagccgccgcgaatgccgcccataaatatttcatcatcatccttgagtttgttcctggtatttcaggccggacatcaggtcgccgcgcctgccgaatgtaagatccgccttgtaagccgtacctttcctcaccaccaccaagggaacggtttcccccggacggtgcctgcccagttcacggagcatatcccgcacggaacgcaggctccggctgtccatgtgggtaatgacgtcccccggctggatgccggcggtatccgccggagaattcaccacaacgtcttccaccaccacgccgtccacgcccagcacatccatcatggcaaacccgagcacaggagattcggggtccgccatgggatgaaggcccagctggccccaatgcctgccggagagcagtttgtcccagtctctcctgaaaacggaaacagggacatggttgttgattttcaacatagggccaatggaggaatggatgccaaccaacttgccggacaggtcaaagaggggaccgccggaatctccgccaatcagcgtgcattccgaaataaggaagcgctgctttccgtccgtgcacaatcttcccatgcggatgggcgcgcggcgttccgggtcaaatcccttggaatggcccagagccaccacaaaatcccccacatgaagaccgtcggattcccccagttccacatggggatagtttcctccgtccatgatttgcaccatggcggcatcccgcgtgaagttggctcccagcacccggcccttgactacgcgcccgtcggcaaagaccacacgcatgatttcatcgccgcccacgacgtgggccgccgtcaaaatcaggccctgcggagtgacaatgacgccgctgcccgtctctcccccgtcggaaaccagagccaccgtagcagccgtaaccctggaggccacctcatgcacatgtttctgcaaatccgccatggaagaaacattccccgcaagacccgcccctcccaacaacagggacacaagccccccaacgaccaagtagcgaaaactcgtcattctcaatagtgatatcatgaaattaccgataatcgaatgataggacataccctactgtataaacgttcaaaacggcagaattttgtctatggattgcgacatggcgccatatcttttgcttagaccatttcgattatttatgataaagtccggcccacggatggggttaaacgacaaatcaaggaaacgaaatgccgcctcctggagggaacgcatccaagatggagaaatgtcttcccgttcccagacggaacgcaaaaaaaggcccctgccccgtccatcctatcccgggttgccgcaggaagatcctgagccggccgttattcccggccctacccgcagaacggggaattcccgcaacggtccttcccggtatgacacgccgccccagcgacgagcctcccgcccgtctccgaaggaagagtacgaagacaatccggaaagagaagaagaaaaccgtcccgcacgcgcaggaaccatgcgcaggccgcgtttcacgattttcggagccctgctgtttgtcctgctgatgccgttccgcttcatcggctccctgacgcggaatatccgctggttcatttgctggcccctgcgcatccttctgggatgctgcttcgtcggcatcgtgatcggagccatcctggtgtttctttacggcgccatttccaaccgctatgacatttccgaggtaaagagcaacatcccggaacgcacggtgattctggaccgtaaaaaccgcaccatcggaaccctgcacggggaaaaccgcaagcgggtatcccttcaggaagttcctcccgtttttattgatgccctgctcctgcgcgaagacaaccgcttttacgaccatggcggcgtggactggataggcgtgggccgcgcctttgcgcaggtgctcaagcacaagagagccacgcagggtgcttccaccctgacgatgcaactcgctaaaattacgtacaaccaccgggagcgcaacctgcattccaaactgacagaagtagctctggctaaacgcattgaagccacttacacgaaggatgaaattctggagacttacatcaaccgtattttctgggggcacaccttcctgggaatagcggcggcggcgcggggatattacgacaaggaaccccgggatttatccctggcggaatgcgccaccctggccggcattatttacggcccaaatgacttttcccccatcaaacacccggaagaagccaaaaaagtgcgcgatatcgtccttggcctgctgaaaaacgaaggcaagattacggaagtgcagtatcaggcggccctggcggagcctatcgccacccggacgccccagtcccggtctgaggaaaattacgccatgggtctcgtgcgccgggagctggacgccattctggaggaagaagacatccgcctgggagggctggtggtgcataccacattggaccttgatctgcagaacgccacgctggacgccatcaacaagcacatggacgcgctggaagcccgcaaggatttcaagaagcacctggcctccctgcaggccaggcgggaaaagaggggcatcctgaaaaacaagctgaccaccaaggcggaatatgaggcatccctggccgcctggaaggcgctccctgcggaacagaaggaaaagacgcagccgccgatgcccaattacatccaatccgccgccgtagtcatggacaatgccacgggggctcttctggccgtcgtcggcggccgggacgcggaagaatccaagctgaaccgcgccattcagtccaggcggcagaccggctccctgttcaaacctttcatttacgccacgtttttccagcagggcaattctgcggatacccgcatttcggatgacaggattgcgtacggggaaatacgcggagccgccaactggtccccccgcaattcggacggaacgtaccggggcatgaagccggcctccttcggtctcatcctttcccgcaacaccatgtccgtgcgcatcggcaaccgcgccggcttgtccaatgtcattcaatccgcacaactggcgggctttcacggaaatatttcccgcaccccggccctttatctgggcacgtgggaagcgtcccctctggacatcgccagcgcctacagcgtttttgccaacgggggcgtacgccccacgccatacatcattgaccatattacggattcgcagggccagccgcgcttcgccatcaccaaaagcaagcgcaccgtctattcccagcgggcggcgaacataacctcttccatcctccagcaggtctgcaagcccggaggcacggcaggaaaaattaccgcgctgggctttaaatccccctgcggcggcaaaaccggaaccacgaataattatacgaacgcatggttcgccggatatacgtccaacctcacctgcagtgtctgggtggggtttgattcctccaccaaaattctggaaaaaggctacggaggcaccctggccctgcccgtctgggtggatattatgcttgccgcccagaaggaaggctatcccgccaacgccatccgtacgcgtcccggttcggaagggcaggccgtactcgtctgccgggaatccaatcaactggcccattccggctgccagtacgccaagactgcgtattttgaaacctccgcaggttaccaggctcccgccaacatgtgtgaacagcacattcccatggcggaaccggattcggaagagagcattccctatgcggaaccgctgaacggcagcgacgataacatccccctggccgaacccgtggaagaaacggacggcatcccctacgccacccccatctgattgcttattttttccttatgatttccccattttttccctggttcctggcctttttgctgctgatcgcctgcgtggcgctgctggttctgctgctgcggtaccgggaccgctccgtccgcctcgaagcggaatcccgctcctggcaggaacgggcggaggacagaacccagatgctccgccgggcggaagaggtgctgaaagattccttcgccggcatcagcgcggaagtcctccgtaactcggagaaacagtttctgaacctggcggaaacgcggctgcaaagccagcgccagcaggccaaccatgacctggattcccgcaaacaggccattgagtccatgctgaagccggtgagcgaatccctgaaactggtccagtcccggctgggagagatggaaaaggaacgcgtgggcgcctatacggacctgaaaacgcaaatccgttatatcctttccggcaatgaagccctgaaaaatgaaaccgccaggctttcccaggctctgcaccacaacagcgttcgcggccaatggggagaactccaactgcgccgcgtggtggaactggcgggaatggtggagtactgcgatttcacgactcaggaaacccgttccagggaggaggaacgggtgcggccggacatggtcattcaccttcctggaggccgttccatcatcattgacgcgaaagcgcccatggcatcctacctgaatgccgggcagacggagaatccggaagagcgcagccagtggatggcccgccatgccgcggacgtcaagaggcatttgcagcaattaagcgccaagaattactttgcccagttttccccatgccccgaattcgtcattatgttcctgcccggggaatcctttttccaggcggctctggaagcagacccctccctgattgaattcggcgcggagaataaagtcattctttccaccccatccaccctgattgccctgctgaaagccgtcgcttacggatggaagcaggagcagctggcggataatgccaagaaaatttcggaagcgggagcggacctgtacaatacctgctctatcctttccggtcatttttcctctctgggcaagagcctgaaccaggcggtagcccagtacaataaaaccgtttcctcttttgaacaccggttcatcccccgggcccagaagttgaaaaacctgggcgtcacctccacaaaggagcttccccgctccctggaagacattaccgaacgggccaaatctgcggatgttccggatattacgccctgaaagagcggcaacaatacgtctttttcccttcctgaccatttccgagccgggaaaatacagctctaaggcatcccccgcaaacgctttcctgcgcctggaagcatcttggagatgtagaggaattcagcctccggcggccctgcccctcccggaattttcaacaattcctatgcgcggcaacgggaaacggcaggctgctttcatcatgcagccgggcagataattcccccgcggcggcgcacaccggcacccggaaggcatccagagcggaacgggaactgtagccccaccccaccagaataagccgtgttccggcgttcacggccgtgttgccgtcatgggcggagtcccccaccatgcacacctgcgccggctccctgccccaggaacggacgatggacagcagggagtcaggttccggcttgcgcggaaagcgttcggaaaaacccatcacctcccggaagggaatttcaggcaggatatggcgcaccagcggcaccgtaaccgcatggggcttgttggataaaacgcccagaggatggccttctccggccagggacaacagcatttcccggatgccggggtacggaaccgtgccctcctgccaggtgtgcgggtattcacgcatgaatccccggtgcaccgcttcaaaagcttcctccggcacgtttccgttgaaatagcctttcagggaagccaggcaaagctcccgggcccccttgcccaccatttcccggatggcgtccacggaatgctccggataccccagcgctttcaaggccaggttcaggccgcgggcgataccgggaatggagtccaccagcgtcccgtccaggtcaaagacaaaacccgttttcatggattcaatggcagaacccccgttcggaagtttccacgaattggatgattctcctcaggcaggcattttccgcataccccgaatgccgcagttcctccagagcttcatgaacggtcagctttttattgacgaaaagctttttatagcacatgcgcacggctttcaggtcttcttcggaaaagccgcgcctctgcatgccgatggagttaacggaacgcgttacggccgggtggccctccacgatcgtgtacggcaggacatcctggctcacgcgggccattgctcccaccatggcatgttccccgatgctcacaaactggtgtacggcgcaacatcccgccaggatggcgtaatcccccaccgtaacatggccggcggcggtagcgaacccggagaaaatcacatgattgccgatctggcaatcgtgcccggcatggcaggaaaccaggaaaaggttgttattccctatccgcgtcgcgccgccaatgtccgtagcccggttgatggtggcgttttcacggaagacgttgttatcccccacttccagataagtcggctctcccttgtatttcaaatcctggcttttcagaccgatgacggaaaacgggaaaaattcgttgccgctgccgaaggaagaaggaccgtctataaccacatggctgtgcagcacgcaaccgggccccagtttgacatgttccccgacaacgcaaaagggaccgattttaacatcatccgcgatctctgcagcaggatgcactactgccgttgggtgtatttctggcatggctgaaacaagtatgaaacaaattcaggtgattaaaagcctaaaccccgcagggccgtctttttatcacatttggccggaagcggccgcataagcctccatctcaggcagccagggaatcagcagaacgtagatgagttgaaggcacagaatgatcagcaccaacgtcatcaccactttgcggaacgtgagggagccgttcagcacatccgtagtccccagcttcctgtcccagggagtaaaaccgaaacggcgcacccaccaccaggaaaaaaacagggccagcagcatcagggaaggagcaaaacaccccagaccaagcaccatgacgaacagggagcgccggaatgccatggggaaagaaaggcgtcttccccggtagtccctgacggaaacgcccagcatggcttttcccggggttgtgcccaatgtcccaagaaatgcagtttccatgagaaccatcgggaggcagaggtaaagcagagcttcataggaaccaggaagaaaaccgggattgaaagcagcgccggataccctgagcacagccaggtacagcgtcatgtgcatcattacatcagccattctgccaagaaaacggacgtacgcatacggaaccaccagcggcactccctcctccgcggcctcccctccttcttccggcaggcaatccgcatctgcggaaagcgccgggacatcttctccccctgcgttttccagcctctcttccctcccgttccgccgttccccttcttctctgccgacggcacctgctcctttcaatgccggaaggtcacggatgcatacccactccgggcatccggcatgccacgcccgggcgttttccggaatgaggcccgcctccagcatggaaatgacctccacttccggcagaggccccttccgttcatgatcctgaatccagtaaatatccataggcgattcctgttacatactgcgcagggagcgggccggatcctggcgcgccgtgatcagggcaggaatgatggatgccaccacgaccatgacaaaagctttcaccgcctgccatgccagctccgcccaatcaatcaccaccgggatattcgccgtgccgtggaaggccacagggaacgggtcaaagcctattcccgcaagaaaaccctgaatctgcatgcggtattccagcaccagaagccccagccctacacccaggagagctcccacaaaaccgatgatgacgccctgccacaggaaaacgcgcaccacctggaacggagtggctcccaaagccttcatcacggcgatttcctttttcctctggatggaaacggtaaacatcaccgccatgatgcaaaaagcggaaatcagggagatgaaggacaggacaaagctcatcatcatgcgctccttctgcatcagttcaaaccacgcgttaaagcggtcatgccaggtttccagcgtccatgcggaagaaggcttctccttttccagcgcctgcatcacgggggccagcatcgtttccacatggtaagggtcttccacgcgcagggccacggcctgcaccacgtcatcctcataacccagcaattcctggccgatgaccagcggaatgaaaagatccgggctgggcgtatgctgggaggcccggtaaattccgatcacctccaggtctttcggcatcaccagctccttgattttccggaagcattccatatccgcctcatttcttgccccggccttgaaaccgctcaaaacggtttcccattccttccgcgttccttgcggaaaggccaccctgccgttgtccgcaatttccccgtcgttcagcacggcaagcagatccatcaggctggaacgttccgcatccctgcgcgggacggacaacagcccgttaagcagggaaaacgccctgtccacggaggctctgccggccatttcacgctctccctccgtcttcaggttctttccccactctttcaaatccttgagttcccgcgcgtttttttccgccagcatcggcagttccgtctgctggtaggcgtgggaaatttcctgaaaattgcgagtcgtataaacccggacaacatctcccacattcaatcccatgttctccgccacgatggaggaaaccacagccttttcccccatgtccagttccgcatcgccagctaccaccaaacgcttcaaatcctccagctgggcggcgttttccgtatcaatggcccggaaaaagcagggcctctgccgcccctgcacatccaccagcgcatagtcttctatcagggcgtaggtggactggacgccgggaacgtgcctgagtttctcccccaaatccatccagtccggaatcacttccctcacgccgaagtcgttccggtagcatacctggacgtgcggggagtgcgcaaacagattcccctgaatttccttctggaggcctcccatgacggacagcacgacaatgagcaccattacccccagagatacgcccagcagacaaatcagggtaataatggaaaagaaagtccgcaacgggttcaaataccgcagcgccagactcaggctgatgtaccggctcaataggttcttcatgaataacgcggcacaccttgcctgatcccgttctcctttccaagcctaaaacatgttccggagaaggagatcgtttacctgcctccggcaccctgccattccaggcacagccagcgggccatggaggcgatcacctggtcacaagcggattcagaatcctttgaatccctgataaacacggaaaccgccattttccggccgttgggaagaacaatgatgccgacgtcattgcgggcggtaacgccaccccccggcagcgtgaatccggatcccgtcttatgcgccaccacgtaatcccgcggcagctgccctttcagacgttcagggcctgtagagcaccccgccatgataccccaaagaaaattctgtgtaccccttgccagaattttaccttcgtcaaacgcccggagcagggagttcatggccgacggacggcttgagttgacatattgcaaatcatgattccggtgtatttcttcttccgtaaaacgggcattaatgccgtcaattccccattccttcaaatccttctgcacggcctgcggccctccaataaggccaaacaggaggtcgcaggtgttgttgtcgctttcctgaacagtcactctcagcagttccttcagagagaaatcgccgccttgcgggaaacgctcccggagggggctccaggtatctttcaccagttgttccggacgtatgcggatgatctgttccagattcatggcgccctggtccacccgcttcaagacagacaaggccagcacgaatttgacgacgctctgcatgggataggccgcctcatcccccaccatgacggtttcccccgtatccagcatttccgcagccatgcccacacgggccttcagggaatgggccagttcgcgtacggcggaggaatccgctgcggaaacggctggcggagaagacgtggccccctgagaaaaaacgcaaaagaacatgatgcaaccgcatagataaacaccggtggaagtcataggcgccattccataccacgcccgcaacaaccgcaataataatttctcccccttttttcctttcttcgtcatccgcaagccgggcagaaaccttgccacctgtccggcttcctgataagaaggaaagcatgccccatctcctttcggaaaccctcgtctggtgcgtcaccctgctgttattcggcatggggctgatcggcacgctcatccccatgcttcccggaattatcatcattgcggccgggtgcgtctggcagggagtcatgggcagagaaaacctggcgtggtgggaatggaccgtcctggcgctgctggtggcgggaggcatggtcattgacaagctttccggaggcatgggcgccaaaaaattcggcagcactgccgccggcatctggggagccatcatcggcgccgtcgcggggagcctccttttctcccccatcgtaggccttttgttcatgccgttcctgggggcgctgctggcggaacttatctttgccagaaaggatatcatggacgccttcagggccggttccggagcggcgcttgggatgcttgccggcctgctgctggaatttacctgcggcctgctcatcatcgcctggttctgttcctgctgtttcctgttttaatgtcaaaaaaaaccgtaaccgtaccctgcggaagccttcggcaggaacaacggagtttctccgttgctgaaagaaacacagtttccccaacgtattccgcaaaacgccgccccgcatgcccgcccggtcgaacgaccgggttctcccattccctcattttaccagcttatggatgcacctgttccgatacccgtcgccatgatggcgggtttcatgattcttggagccattctttccatggggaaatgttcctgtctcatcgcaggctgcaatatgatgaacagagggcagaaaaagcagtatgatgaacaggcgctgtgcaggttcttggggaagatcatgtactgcctcgccttcgccatgctgctctggctcgccagcatcattctccagaactccgtgctcctgtccgcctccctgtactttctggtgggaagcatcgcatttgcggtcatttacgccggcaccggaagatgatttaaaaaatagcgttttttacaccagctttcttttacttttattatacgcaacattatcttctcccatgaacgtccctgcaaccttgaaacattccttcctgctctgccttttcgcggcagccgtcccactccgggccattccggcccccatgcaggtcaccgccgccacccccgcccgggtatggacggaaggatacggcacgggcaacggaaggctgggcatcctctctttcggcgtttttccgaaggaaaccgtcgtcctcaatgaaggaagtattttcgcaaagaaaaatttccaaatgagggaaggcgccgcggaagctctggacaaggcgcgcgaactttgcaaggaaggaaaataccgcagtgcggatcagctattccgtaagaatatccttccccccggcaacattgcgggggattaccagcagggggggcgtcttcaggtggaattccaggggcttccctcaccttcctcctatcagcgtacgctggatatgcggcggggcaaggcaaccacccgcgcccaattcggcacgggggaattgaccacagaaatcctggcggccccgtccagcgactgcgccgcctaccacattgcctgtacgatgccgtccggatgccgcgtttccctgaatctggaacacccggatccggcttcccgaattgttgcgcagccgaatggctgggcactggaaggacagggaagcaacggaggcacccggtttgaaaatacggtggccattctggctcccggagcctccattactcgcaaaggctcaacaattattcttgattccgcccgggaagtgctggtgctttcatccatttccacagattacaatatccggaagccggaaactcccctgacgcattccctgacggctaaaaacgcgcgaatcctggcaaaagcgcaaaaggcgggatggaaaaaactggcggcggaaacggaagattatttttcccggctcatgacgcgctgccaggtggatctgggagattccccggccggggtctccgccatgaccaccgcccaaaggctggagcgggtcaaacagggaaagaaggatccggatcttctggaacagcttttccagttcggccgcttcagcacgattgtccacaccaggccggggcagcttccctgcggtttacaggggttatggaatccggagttgagggcggcgtggatgggctgttatttcctgaacatcaacagccagatgaaccagtggccctcccatgtcaccgggctgggagaattccagaactcctatcttgattttgtccgcagcctgcgcccccacggagagaaattcgcgcgcttcatcaagcgggacggcttctgcttcggccactatacggattgctggaaacgcacctatttttcaggcaacaatccggaatggggggccagcctcatgaacggggcgtgggcgtgcgcccacctggtggacagctaccgcttcaccggagacagggaagaccttaaaaaatcgctgcccattctggaatccaacgcgcgattcatcatgtcctggtttgaggatgacggcgagggccgttacctttccggcccgggggtgtctccggagaccggattttacgcgccggacggaacaggccccaacgtgctttcctatgtttccaacggcgcttcccatgaccagcttctgggcagggaatccctccgcaattacatttacgcctgcggggagctgggcgtacaaacgcctactctgcttaaagccgtccaatttctcaggaaaattccccagccagccatcggccccgacggaagggtgcaggaatggaggcagccttttgaagaaatgcagaagggccaccggcacatcagccacctttacggcttgtttcccggcacggaatgggacattctcaatacgccggaatacgcggaggctgtacgcaagtcagccgatttccggcgcaagtacgcggatatgggaaacaatggcatcaggaccggatggagcacggcgtggctcatcaatctttacgccgcccttggcgacggaaacgccgcagaggacaggatgtacaccatgctgaggcactacatcaactccaacctttttgacatccatcccccgttccagatagacggaaatttcggcttttcctccggcgtggccgaatgcctgatccaaagccggatcatgcaggacgggttccaggttatcctgctggctccggctctggcagacggctggaagaagggttccgccacgggattgcgtacgcggggcgggcttaaggtggacttgtcctggcaaaacggccgggtgcaggccacagctaccgctacgcgtccgggcaaattccggttcatgcatcgaggcaggaaaaaggatttgtccatgaataagggagaaacggcgcgtcttgattttcctccgctttcccattaggattcccctctctgcgttacctcttcaatttccgccatgcatttcttttccatgaccttcaggctcggtctgctcatggcggtggtctgcatcgccctcagctcctgttccaagcttttttctccccgcggaagcggaaaaataccggacacggaccaaacggaaacgctcctgaaagagcatgtattccacctggcggattccatcggtgaacggaacgtctaccaccccggctccatggagcgttccgcccgctacattgaacaaaaactggagggaatgggttatgccgtcacgcgccaggctgtccgtatcccaccctccggaaaattcggcgccgtcaaggactggacggcatataatctcatcgccatcaagaaagggacctccccccggcccaaaatgctcatcgtcggcgcgcattacgataccaaagtgggcatggacaactggcacgaccacggtcctgcccggccttcccgcaccggaacgccgggagccaatgacaacgcttccggcgtagccgccctgctggaaacggcacgtgcccttgcagcaacttccacccttcacgatgtttgcctggtggcctacgccaatgaagaaccccctttttaccagacgcccgccatgggcagcgcagtgcatgccaaatccgtctctcatcatccgggcaggaaaaaaatcatcggcatgattgccctggaaacgctgggctgctattccccccgggtgaataaaaaacgccaatccgccgtagttgccggattggccggcctgccggaccgctgcgactatgttgccttcatctccaccaacacgggccgcaaactggcacgctcctgcgcggaggaattttccgccttgagccgttttccggtgcgttccgccgtgttcccgtattacacccgcggcgtttcctggtctgacgactggggatacatgaaggagggcatcccctcctttgccgccacggatacggccttcctccgctgcgacgattaccatgaaaccagcgatacggctgaaaaactggactatccccagtttgcagaagtggtgcagggcctttccaaactcgtcatttcactggccaacaaaccatgaacaaaaaacagatattattctccgcgctttttctgacattcgcctgcgcttcagccggggccgctccgcctgaaccgtccgcgctgggggccttctgcccgccctcagagggaaaatcctttcactccggatggatttccctggggctcaaagcggcggacctgaaagaaaaacaagtctccgccgaacacattacggacgtaggggaagcgcaaatccagcttcattttcccgccggatggagtccgcaggacaggcgtacggccctgtgtattttttcgggagggggatatgccatccaggccattggaaagaacgggagccgcattgccggctgggcggcggaacacggcatggtgggggttatcgtcaaataccgcgtttcaggaaccaacaatgccgtggggaggtttcccggtcccctgctggacgcccgccaggccctgaggatcgtgcggaaaaacgcctcctccctgggaattgaccctctccgcatcggcgtcatgggcttttccgcaggcggccatctggcggccatggcttctacgctgtggaaccgcaccctgccggaagaagcggaaaatccgctgaaaaacatttcctcccgtccggatttctccatgctcatctatcccgtcatttccatggcgccccatacaacccacgggggaacgcgcaacaaaatattgggtccccatccctcccctgccctggaggagatgtgttccgcggagcggcaggtaacggaacagacgccgccggtcttcctcgtccacgctctggatgacggcgtttcctgcgccaacagcaggctgatggaacaggcctgccggaataagggggttcccgtcagcctgaatctctatcccacgggaggccacgggtatggcatggaaaaacgcgggcatcccacggatcaatggcctgaggccgccgaacaatggctcagggaacagggatttcttccttccccggcttcagcccgcgggggtgcgccctccggagcgggcacttcctccggaacacggcgggaatgaatgcgctaggccccaggtgtgccgcaccgcagggttgaccggaaccgggtccggtgatactttttccgggcatgagtgcgcctgaaaagaattataaagacaccatcctgttgccggagaccggcttccccatgagaggggatctgacgaaaaacgaacccgtacgcctgacaaagtgggaagacaccgggctgtacgaacgcattttgtcccgcaggatggcccagggcgcaccccggttcctccttcatgacggcccccccttcgccaacggggacgtgcacatgggtacggccctgaacaaaattctcaaggacctggtcctgaaatcaaaaaccatggccggttatgccgccccttatattccgggctgggactgccacggccttcccattgaattcaaggtggttcaaaaggcccgtgacctggatgcggcggaaatccgccggcgctgtgcggaattcgccaaaggattcattgacattcagcgcacttccttccgccgcctgggcgtgttcggcgactgggagaatccctacctgaccatgaagccggcgtatgaagccaacatcctgcgcgtgttcgccaaactggtggaagacggagcggtgtaccagagccgcaaacccgtccagtggtcctatggggcctatacggcgctggcggaagcggaaatcgactacaaggaaaaggtcagcacctccgttttcgtgcgcttcccgcttctggacaatcccctggggctgaaagcctccatggtcatctggaccactactccgtggacgctgcccgccaacgtaggactcgccctccatccgcgtttcacctacgtggcaggcaggttcatgaagaacggccagacggaaaacctcatcatcgtcaaggagttgctggatgccttcgctcagaaaacgggctgggctcttgcggaaaccatccgtgaattcaaaggagccgaactggaaaactgcgaagcccggcatcccttcctttcccgcacgtcaacaatcatcctggcggactttgtcaccacggacaccggaaccggcattgtccacatcgcgcccggccacggcgcggacgactataacgtgggacgccaatacggactgcccgtcctctcccccgtggacgacgacggcaaatacacggaagaagtgggcgtgccctccctggtgggcaaacatgtctttgacgccaacaaggacatcatttccatgctggaacagggcaacaacctcttcggcgtggaagaataccgccaccagtatccgcactgctggcgttccaagacgcctattattttccgggccgtggaacagtttttcatctccatggacaagctccgcccgcaggccttggaagaaatagacaaggtgcagtggctgccctcctggggccgcaaccgcatttacggcacggtggaagccaggccggactggtgcatttcccgccagcgcacctggggcgtgccgctgcccgtcttctttgacgaaaacggcaaagccgtcctggacgccgctctggttcgcaaaatcgcggatatggtggaaaaacacggttccaacatctggtttgaactctccgatgaagacctgtgcgaacgcctcggcttgccgaagacctggaaaaagggcaaggatacgctggacgtctggattgattccggcagttcccatatggccgtcatggacaaccgccccgggctggacgcgccggcggacctttacctggaagctacggaccagcaccgcggctggttccagagttccctgatgctttccgtcgcctggcgcggcaaggctccgtacaaggccgtaatgacccacggcttcgtcgtggacaaggacaccgggaaaaaaacctccaaatccgacgccaagagcggcaaacccattgacgcggcctattactacgacaaatacggcgcagacatcgtgcgcctgtgggccgcctccgtggactggcaaaatgaagtccccttcggggaagacctcttcaagcaggtgacggaaccctaccgccgcctccgcaacaccctgcgcatcctgctgggcaacatcagcggattcgatttcgccgcgcaggcagtcgccccggaacacatgcccctcctggaccgctggattctggaacgcctgaacgccgtcatcagggaaacgctgaaggcctatgaagcctatgacttccgcaaggcgttcagcgccatcaaccagttctgcaccagcgacctgtccgccctgtacgtggacaccaccaaggaccgcctgtactgcgactcatcttcctccgtgcgccgccgcgccacacaaacggccatgaccatcatcttcaaggctctgtgccgtctgctggctcccatcctggccttcacggcggatgaagcctgggaatacgcgggatatgaaggcagcgtgcatgagcaggacttccccgcccccatgccggaatatgatacccaggaggcgacctccgtcatttcccgtctccaggaaatcaagtccgtcattcaggtagccattgaagaacaggtgaaagccaaggtgttttccaaaaataatgaggcatccattaccctgaccgttcccgtgaatgagagcgaagacgtcgtggcgcttctggaagaccgggcgtttgccacggaattcttcatcattgcggaccttgacgtgaaaaccggtccggaactggcagcctccgccgcaaaaacggaacatgccatgtgcccgcgctgccgccggtatgaaccggcggcggaaggcggggacgtatgcgaacgctgcgcggaagttctttcctgaaccgcatccactccattttccgacctttatatggacccccagacggaaaaagaacccgccccccataaaaagacgccccccggctggctctggtggagcttgctgggcgcagggctgtatgcgctggaccaggccagcaagctgtggattatccgccgcttcccgctgaactacctgaacgaaaagctccataagtacgcctatctgccggactttccgggcttccagcacatcaatgcggacggcacgctggacttcgccacgaacggacgcatgccggaggcggaactggcgcggctcccggacctgaatccaaacacggtggacgccctgaacaaactgagggaactggaacccatttccttcctggacggaaccatgaacattacccgcgtgcacaacacgggcgttgctttcgggctggggaacggcaccgtctggtccagctatcttttcctggcagttcccgtgctcgccatcgtggtcctggtcgtgctttaccggaaaaacttcttccacacggcatggctcaagctggcctatgtcctgctgctggcgggcgtagccggcaacctgacggaccgcctgattcagggcttcctgattccgtatgagcagcagcacggtttcttcaccaagctgatgaacggttacgtggtggacttcattgacgtcaccatccccctcttcaactaccgctggcccgccttcaatgtggcggactcctgcatcttcgtagcggcaattattttcttcatcgccagcattttctccgccaggaataaagaagaaaaaacatcctgaaacgcccatgaccacccggctcgttattctgtcaggactgcttttgtgcgggagcctcgcctccggcaaaaatgaattgtccttcaaggaaacggtggttccggtaaaggtggctccggaccaggacaacatcacggcatccttctccttcaccaacacttccggcaccccggtcaccatcagtaaaatccacgtttcctgcgactgcaccaccgccggagcgaaggataacaagctgacgtatgccccgggggaatccggcgtcatcagcgccgtaatgaaaaccggcaacttttccggcaccgtggacaaggacatgacggtgtacgccaacggctccgcctacaagctggtcatacgcgcgcagatcccggacatcatccggatggaaccccgcaagctggaatgggccagaggagaggccgccgcgcccaaaaccataaaaatcaccatctccaaagaactgcccgtcaacctgaccacggtggatttgacgggagacgcctttgactacgagcctgtgaccgtgaaaaaaggcagggaatataaaatcatcgtcactcccaaatccacggccaagccggccttcaacaccatctgggtgcgcacggattccgccgtgccgcgctacaaacgccaaatggggttcctggccatcaaggaaaactgacatccgcccttccttccatgagagacgccttttcctccgctctgaaactcctgctggccgtatttctgctggccgtaggcgtcgccgcgctggatctgcgcgtcatccagccgttccgcacgccgccctgcaacccggaaactctggaggaagggcacgtgtgcctctcccaggtattaaaggaatggccgggaaaaatcctctggatagatgccagaaagcaggacgactttgaacgccataccgtcacccgggcccccgtttaccccatccgcccggcggatgccaattaccaggaactcctggcgaatgccatggaagccctgatgacggcagaggacaggggattctgcatcgtcatcttttgcagcagggactgcacctccagcgcggccgtggccaatgaactgaaaaagccggaatacggcatccgcgcgcccattttcattctggaaggaggctgggatgaattgcgcaaagaaccctcactagtaccatagccatgcttgacacagcaaccattcgcccgcagttccccattctggaaaccagcgtgcacggcaagcctctcatttacctggataatgcggccactacgcaaaaacccctggccgtgctggacgccatccgccattactacgatacggaaaacgccaatgtgcaccgcggctcccactacctgagccagctcgcgacggaagcgcatgaagaatcgcgggaaacggtggcgcggttcatcaacgcgccggaaacggcggaagtcctgttcacttccggctgcacgatgggcatcaacctggcggcggataccatcgccgcgtccggcatggtcaaaccgggagacgaagtcatcgtaaccgcttccgaacaccattccaatatcgttccctggcaaatgctgtgcgaacgcacgggcgccgtcctgaaagcggttcccctgacgccgggccagactctggacatggaagcttaccggaacatgctttccccacgcacccgcatcgtagccgtgggacacgtttccaatacgctgggaacggttaatcccgtgagggaaatggccgcgctcgccaaggagaacaggcaggaaaccatcgtgctgattgacggagcccaggctgtttcccacatgaatgtggacgttcaggaactgggctgcgacctgtacgccttttccggccacaagctgtacgcgcccaccggcatcggcgcgctgtggggaaaaagggagctgctggagaaactgccgccgtggatgggcggtggggaaatgatcaaggaagtcacctttgaaaaaaccgtttacaacgacatccctttcaaatatgaagcgggaacgcccaacattggcggggcagtgggtctggcggccgccatccgctacgtctccgggctgggcctggacaacattgccgcccatgaacagaaactgacggatatggcggtggaaggcctgaaggccatgccgcgcctgaccgtactggccccggacgtgccgcacagcgccgtggtctccgtcctggcggagggcatccaccactatgacctgggtacgttgctggaccagatggggattgccgtaagaaccgggcaccattgctgccagccgctcatgtgcgccctgggcaccaccgggactacccgcgcctcctttgccctgtacaatacggaagaggaagtgcagaccttcctcaaatccatgaaccgggcgctggacatgctctcctgaataaccctcccttccctgcttatttacaccgcgcatcatgaaaacggtttccatccttctcttaggactggccataagcctttccggctgttccctgcaccagcggcaggaaatggagtacgcccattaccaggatgacgccgcggctatccgggaggcccatgccgcatggctcattctttcctctcccaaccgcagccgggaatggccggaagcccggaaaaaatacaatgcgtgcattcgggagctagcctcccacctgaaggaagccaaacgcaaagggggcatgaatgaagagaagcgcctgagccttcccttcgtcattgaaaaatctccctatgccagggacagcaatccgtggttctatgaggccattttcatgtccgatgaagtggaccccaccttccgcctgcgcgaaagcgtgacggtagagggaatgggcataccgctggcggggctggcgccccggggcggttcccgcccccatgccaacgtgcttaaggacaacggcaacgtgcacacgctgacggccattctggactttgaccgcatggtggacgggaaaccaaccctccgcaccattccgcgcctgatgaatgagcacatcttcattggcaaaaacaaggtgcggcagcctctggcggccaatttttccgtccccatcgctctcttctggaagctttccgacgcagacggaacggaactgctgggggcattccgccccaaaaaggccatcaatacgatggggctttatttttccgaaccctatgacccccggaaaatacccgtggttttcacccacggcctgatgtccggccccgccaccttcgctaacctgaccaaccgtctcctggtggatccggtcatccgggaaaactaccaattctggttcttcggctatccgtccgggctggcctggaccattccggccagcaggcagcggcaggccctgaaggagctcatgcaggaatacaatccccgcggaacatccagggaaatgaacaacatcgtcatggtgggacactccatgggcggcctcatcacccgcttcaataactccaccaaaccctggacgctgatgaagggagtatttgagctttctccggaaacgtttgagggaatgacgctggaaaactggaagaaaggaatggcccccctccattatgatgaacaaacgcttgaacggctccagaataatttcatcttttccccgccccagggagtcacgcgcatcgtgtacatggccaccccgcaccgcggttccactttcgcggacaactggataggaagactgggccagcgcctgatcgacctcccctcggacatgctggaagaagtcacccgcatcgccactctcagccgcggcatgttcctcctcaaccccctgcaactgaaggacgagctgaccagcatccgccagctttccccgaattcatccctggtcaaatacatgtcggagctgcgcggctccccaaatgttcccgttcattccatcattggagacaggggcaggaacgacacgcccaattcctccgacggagtggtcaagtaccactcatcccacctggactggagcgccagtgaaaaaatcgttccgtccgggcacagcgtgcaggatgacccggcctccgccgtggaactgcggcgcatcctccgggaacacctggtcaaggtcaaaggccgtaaaacgctcgaagaagcggacgcgaaagccgccactcccgtatggcaggccaatccctcgccgcctatcatcctgaaaaggccctgatgcaggggactgtttctccttgtccatgcaaggcctccttcccttccccccttctgctgttcctgctgataacagcagccatcttccagtcaaacggccacgcctcggcgatcctgtttccgggttcctgtatgtcccggctttaacggttggaacgccctcgttcatccaccctccctgccgctcccggaaaaaaacaggaaccgaacaggatttaccttgccgcgggcatctgcggcaacatgccgccgcggcggttgaaacaactgaaattttccccgctcattacggcctgttcctggctgccctgatttgactggccggttacggaaaagggcgcgctccatccgggcatgattggcgtccgttcagcatcagggcgtcccgccatcaaaatatgcccgcttatagagttgcttccgtaggggaatttaaggtagagtgggaatcaatactattccacctcccttttccatgtctgccgacgattcctttcccatggaccagatttcctctctctttccccaattggaaaatattcagcttgtcggagccaaaggcccccagcaaattttcacagctaccctgaaatccaactttgctcccgtcatgctgcgggtggttcccacggaagaagccggcatcttcggctgggatcctgaattcatcgtccgctccctcaccatcgtggaacaatcccaccaggggctcctgcgcgtttatgaagtaggacaggcggggccgtttactttcatcatctccgaacaccccccctatccgcggatggcggatatggaaacccttccccaaatatctccccaggcggcgctcaacctggtgcgcaacatggcggaaggactgctgacgctgcaccggaaaaacatttttcacgggggcatcacgcccaagctgatttgcctgcgcgaagacggcggagacgccctgctgctgcccatcaacatttatcccgcccaacctccggtggacatgggggacttcgcctctccggagtgggtcaccggagcggaaaccacgttcacgccgggcatggatatttacgcactggggctggcgctttacattctgcttacccgcaaaacgccgatggaagcgggctttgccatgccctcctcactaatcaaatgcagcgatgccgtggattcggcagtctcccgcgccatcaatccggatacccgggaacgctaccgggacctgggggatttcatcacggatctggataaagccattgccaatcctgcgggaagaaatgcggcctccatccctccgccgccatcttccccggccattccggccctgaacatgcaaaaagggcagtccaacatctattactatctcattccggccctgatcgtgggcattgtgctgacctatacctgcatcctgtataagaaggatgtcgttagaatgcgcaatgattataatgaacaggtgcaaaaggaaaataacgcgaaagcggaagcggcaagacaagcgaacagggacgcgcgccgccacgctccggccaccgcgcaaaacgccgttgcggccattccttcacctgttccggccgcgcgtccggcgcaggcgccggcagttcccaaagtttccgcggaacccggcaaagtcaattggagccttcagcccggcgtcaaggttcgccagagttccaaccgcaacatgctgggagcttacggtccggaaaaggccgttgacggcaataccagctccaagatttccgacgtttcaatcagctccacaggcgtggttgagggaaaaaccgcctggttcggcattgacttcggcagggagaccaaccgcaccatagaaaaggtggtcatttacacgccggccaacctgacgctgctgggcaccatggaaaaattcaaggtaatcctctacggcaatgacaaaaacgtgctggcggaaaaaaccttcagtaccactccttcggaaaaatccaccaacgtcacttcctggaaactggacgctccggtcaaggcgcgagccctgcgcgtggaatccgcaaatccctcccagccgctggcgttgacggaagtggaagcgtacggaccggaagatgcggaggacacaccggctcccgcacctgcggaaaaataattatccacgcagccctgctcccgctctacccccctccgggggccatgctgaaaaccgccgtttcctttccccttcccggaaagcaggttggggcagggcctgatggaatgtcacacgctaagttcctggtttggcttcgcgtatgaaattttccggtttctgctccattctccggaagccatccaggcccggacggaggaaaatccgaaaaacgtatttgcgccggaccggaaatagccgcccctctccaccttccccaccccggaaaaacgctctcatccccatatggctcccggggaaatatcctgaagcggctgtcgtccctgtggacccctttcccattcaggaaaaacaatactccggaaataaaaaacccggcgccgcctcacggcgggccgggccagcaaaatagcaattcttccgattaccggttggcagacttcacaatcatggcatccttgccgatgcggccgcgcagatagtgaagtttggcgcggcggactttgccgcggttcacgacttcaatcttggcaatgcggggagtatgcagggggaatacgcgttccacgccttcaccgtaggaaattttgcggacggtgaaagcttcattgatgccggaaccgcgcttggcgatcacaatgccctggaaaatctggatacgttccttgccgccttcaataacacgagtgtgaaccttgatggtatcacctacgttaaatggggtcacatccgccttgagttgctcttgctcgattttgttgataatgttcatcttgtgttatctattgctggtgaatatcagtaaaaggaaaacttacgggacgcagaatatgagccataatcccctaaaaggcaatccaaatttgccgtacgtccttaatttatttttccggcgggtccggcggcggagccaccctggcaagccattcctccagcgccggaagaaaagcggaggaagacatgaggccccggatgccgtccgcccgctgcagaaaagccttgttgccgccccgggcccgttccgccatcaggatttccagcagcaggcgcgcacgggtgcgggcgtcagccgcgccgtccagggcggaggaaaggagctctccggcgcgggccggttccttccggtacaggcattccagcgccagagcttcataaaggcaggaaaaaggggccttccgggcggactccatcaaacgcgcggaacggtccttccagcggtctccgaactgcacggaggaagcccaccacccctggaaataacggtcttcttccgtcggctccacgtccatatccttcatgcgggcgtatggacggtacagggggtctccgaacaccaacccctgccaggacagcacaggcatgctcatccaggaagcctccgccacggtatagccgtccaggaggcggtccacaaaaatatcaaagcggtggcaggcgcccaggaacggctcatacacgtttcccaccgtcacagcagcccccttctccagcagggcggaactccatcccctgccggggaccttgaaatcggcggcgctgaaggaatgcagatgcatggctatcgccccgggccggaagcggaacgaaggatccgaaaacggtccgttcgcattccccgcataccacccgcagtaaagagccgtatcccggctcaaggggaatttttccggcagggtctggggccagtcatccagataagcgggaatgcccgcctcccttacgcgctcgaacacgtcgtccagccaccggtccccctgggcataggggccgccccggtccacaacggcccacccccataaaccttttttctccacgttcgccggttccgccaccagccgcatgcaggtatcgggcgtcagtccgtccaggcggcataccagaaacgaaggaaggccggaacccacaaaatcctcccttttattaaaatagggattcacctgccaggacttcctttcataaccgcccaccgccagcagagccaattcggaatccaccgcagcgcgatccgtctgcatctggttgacgcctttcccgggaaggggagcgggcgtttcatgccgtatcttcatcggcaggtccgccatcagcaccagcacaaaaatcttccggttcatcaagggggaggacgcaatgccggaaggcacccaccaccgttgtttccgcgccgcctccagcagcgggacgcggatcgtatcctcatactccttccgcgaaatctcgctggtcgtggggcaatccagggaaacgagattcccttccggaacgccgcgcacccgcgcatactccctggccatgcggcggctcagctcggattttccgttataaaccacggccacatgagcgggcagcagctcataggcacacgaggcggaaaaccacgacgccagcagaaataacacggctaatccactcttgaacatgcccctaccatacctcatcttccggggcaatcaagcaggtgaaaggggcggccacgaattcgccatttttccgcttttcgcttcacatcctaaaaaaatacgctttaataactcttgatgtattgcaggcctcccccctgcattcccctataaccatcacacgcatatgattcagcaaattgaccatatcggcatcgccgtcaagagccttgacgccaccgtcccctattaccgcgatgcgctcgggctcggagagccccacattgaggaagttcccactcaaaaggtccgcgtcgccatgtttgacgttgccggagtccacatcgaactgctcgaacccacctctccggaaagcgctatcgccaaggctattgagaaaaaaggggaaggcatccaccacatcgctttcaagaccaatgacatcgccggaaatatctcccaggccaaggaagcaggccttaccgtgctgaacgacccgcccgtccccggcgctcacaacacgcaggtcaccttcctgcatcccaagtgcaccttcggcgtcctgaccgaattctgccagcaccccggcggctgcgaatgcggcaagtaacattctccctattcaccataccactataccaatggctattgatcccaaattgattgacgatctgaacagccgccgcaagaaggtaatcctcagcggcggtcaggaaaagatcgacaagagacatgaaaagggcgaaatgacagcccgcgaccgcatggggtacctctttgaggaaggcaccttctcggaaatcggcatgcatgtgcgccacaactgccacaacttcggcatgggcaagaaggaaatccccggcgacggcgtcgtttccggcttcggcctggtggacggccgtccggtggcctgcgcggcctccgacttcctggcccagggcgggtccctcggctacatgcacgccatgaaaattgcggatgcccagaagtacgccctgaaagccggcatcccgatggtgaccgtgaacgactccggcggcgcgcgcctccaggaaggcgtggcggccctttccggctatgcccaggtgttctacaacaatgtgcttgcctccggcgtggttccgcaaatctccatgattctgggtccctgcgcgggcggcgcggcctactcccccgccctgacggacttcatcatcatgcgcaattccggcaacgccggcatgtacatcaccggccccaaggtgattgaacaggtcacgtatgaaaaatgcacgatggatgacatcggctccgccgccattcacgccaccgtatccggcaacgtccatttcgtagcggacagcgacgcgcacgccatggacatcctgaagaggctgctttccttccttccttccaacaacacggaagaaccgcctcacaaactggacaccccgcttgacctgagcgcagacgaaggtatgagcgacctgattcccggcgacaaccgcacgccgctggacgtccagcccatcatcagccgcctggtggacaacggggacttcctggaagtgcataaggacttcgccaaaaacgtcgtcgtcggcttcggccgcatctgcggcgtagtagtcggcatcatcgccaaccagcccaacgtgaaagccggctgcctggatatcgactcctccgacaaggccgcgcgcttcatccgcttctgcaacgcgttcaatattccgttggtgaacctggtggacgtgcccggcttcctacccggcaagaaccaggaacggggcggcattatccgccacggcgccaaactcatcttcgcctattcccaggccacggtgcccaaagtcaccctgatcatgcggaaagcctacggcggcgcctacatcgccatgtgctgcaaggacctgggcgctgacgccgtcttcgcctggcccggcgcggaaatcgccgtcatgggcgcggaaggcgccgttccggtgctctacggccgtgaattgaaggctgtggaagacccggcggaaaaagccaagcgacagggagaactccttgaagaataccgggaagccttctacaacccgtatgtggcggccggcatgggacagatcacggaagtcatcaatccggaagaaacccgcgccaaaatcgccttcgccctgcgcaccctgctgaacaagaaggaagtgcgcccggccaagaaacacggcaacattccgctctaacatccatctcaacggatcatatgttactcacaacactcgcctttgcacagggcatcgccaacgtcatgaacaatctgaactatcagattgtcggcattatggtggtcatgatgtgcctgggtggcctggccgtcattctgaccatcagcggctccatcgccgccgccattcagaacagggccaaagccaaaaccgccgctcccgtggccgcgcctgccgccgcccccgctgcggcgggcaaaccgggcatgactccggaaatgctcgccatcctctccgcagcggtggactccgccatgacggagctcacgccggaaatggtggccgtcatctccgccgccgtggacgcgggcctggacggcatgagccaccgcattgtggaaatcaagcaatccccgggctccggctatgcggccgcaggcagggcggaaatcttcgcctcccaccgcattcggccttcccgttgaactacagcattattcacccttacccccgccccggcgggaaccatttaacttaatactccataccatacattatcatgaagaaacttcgcatcaccgtagacggcaaggtatttgacgtatccgtagaactcctggaccaggtatcctccactaccgcagccccggcccccgcacctgtggccgctcccgctcctgccgcatccgcacccgtggccaccccggctccggctccggctcccgcacctgcgcccgctccggccgccgccggcgcaggagacgttcccagcccgcttgccgggaaggtcgtctccctggacgtggcagcaggcgcacccgtgaaggccggtgaccagattctgacgctggaagccatgaagatgaacaccatcatctacgctcccgcctccggcacgctcaccgctttctgcgtgaacccgggcgacacggttcaggaaggacaggcactggccaaaattggttaatcccggcggcggcagcccggaaacgccaacagtcccgggctccggctcaaataataaaccgctacaataacattccgtatgagtctttttgattcattaatcacctttttacaggggatgggcgtcttctccctatcatggcagatggtagggatgtggggcattgccattctcctcctgtatctgggtgtagccaagcaatacgaaccgctcctgatggttcccattgctttcggcgccctcatcgccaacattccggacaacggaatgctcatcacccagctgaaccagcaggtcatctcctccaatgaacagggggaagtaacctccacgtccctgaacaacgtgggctacctgcgcgttcatgtggctcctctgcagcagacgcccgccaaggtgccggccaatctgaccacgccggaagcccgcgcccagtatctggaaaccatgcagcagcccatgcaggtttatcccggcagccagctgaccgtttccaaaatcaagtccgtgcgggaatcccaggaaaaagccaaagctgacgccgcccgcctgggagacgacagtctgacggtggatcccaacctgaaggacttccagaacgtgacggaggacaacggcaatgagccggtcttcctactcacgaacggagaaggaaccaccgtcgtccgccagcagggcgtcaattactttgacaccagcggcaaccgtgttcccgtggacctgaaaacgcagaagctggaacccctggtggtttccgccgcaggcaaatacgtggccgtaggccaacatacccaggaactgctggtcacctccatccacgggggcctgtatgactggatcgggctgggcatcaaggctgaaattttcccgcccatcatcttcctgggcgtaggagccctgacggacttcggcccgctgctcgccgcaccgcgcaccctgcttctgggcgcggcggcccaggtgggcgtagccgccacgttcttcatggccctgttcatgggcttcaacccgaatgaagccgcctccatcggcatcatcggcggagctgacggccccacttccatcttcctgacgatgaagctggctccgcacctgctgggcgccgtggccgtggccgcatacacgtacatgtccctggttccgctgatacagccgcccatcatggcgttgctgacgaccaagaaggagcgcctcatccgcatgaaatccctgcggacggtcagcaagagcgaaaaactgttcttcgccgtgctggtaaccattgtcaccattctgctgattccggacgcatccccgctcatcggcatgctgatgctcggcaacttcctgcgcgaatgcaaggtgacggaacgcctggttcaggcctcccagaatgaaatcatcaacatcgtcaccatcttcctgggaacctccgtgggtctcacgatgcagggagaccgcttcctgcaggcggaaacgctgctaatcattctgctgggcattgtcgccttcggcgtagccactgcgggcggcgtcatcgccgccaagctcatgaacctcatctggcgcaagaatccggtcaaccccctcatcgggtccgcaggcgtctccgccgtcccgatggcggcccgcgtctcccacaatgtgggccagaagtacgacccctccaactatctgctcatgcacgccatgggcccgaacgttgcaggcgtgatcggcaccgcagtcatcgcgggctactacatcgccactctggcgaaataaccagaattgaaaattactcccggcctcggcccgtcccatgaattccgcagcctcattttccacccctccggaggaggaaggaccatgcggcgactggacttatcatgaatgggccgaggctttttccaccaatgacctggcccgctccctgcccccggggcatattgccgtctgccgcgttcagacaggaggccgcggcaggttcaaccgcaaatggataggggaggaaggcggcctgtgggcatccttcaccgttcccctgtccgctcctgcggatacagcggccggcgtgcactggggccatttgcccctggttgcggggctggccctgttcaacatgctccgcggcatggggctggattccgtgcgcctgcgctggccgaacgacctgctggcgggcaaatccaaactggcgggaatactggtggaacgcccggcggaaaacatggccgtcatcggcatcggcatcaatgttttcaatgatgtagcctccatcgccggggaaatcaaggaccctccggcaaggctggcggatcttgttcgggactgcccttccctgcacgccgtcatggcttccctgggcagtcatttgaaccaggttctttccgtcttttcccacggcggcgtctctgcccttcaggagggtctgtcctgggcatgggccggagaaaggccggtttccattcttacggatgacgaaaccgtccggggtatttttacagggattgacgatcagggcaatcctgtgctatcccttccggccggcgccgtccgcaccattccggcgcacctgattaacaggctcctcgaagaatgagcctgccgctccgtttttacacggggtttctttcttttttcatccaacaaaaatcactgacatgagttacaaggtactgacaccagaagaagcagcaagcctgatcaagcatggccaccatattgggctgagcggattcacgcccgccggaacggccaaggccgttacggccgcgctggcaaaaatcgcagaagcggaacatgagaaggggaaccctttccaggtgagcgtcttcaccggtgcttccaccggcgattcctgcgacgggatcctttcccgggccaaggcaatccgctaccgcgctccctacaccaccaacgttgatttccgcaaggcggtgaacaacggggaaatcgcctataatgacatccatttgtcccagatggcccaggaagtgcgctacgggttcatgggcaacgtggacatcgccattattgaagcctgtgaagtcacggctgacggcaaaatttacctgacggccgcgggcgggatcgctcccaccatctgccgcctggcagacaaaattatcgtggaattaaacgccgcccacagcaagagcgccatgggcctgcacgacgtttacgaacccctggatcctccctaccgccgcgaaatctccatcttcaaacccagcgaccgcatcggcaagccgtacatccaggttgacccgaaaaagattgtgggcgttgtggaaaccaactggccggatgaagcccgttccttcgccgcagcggatcccctgactgataaaatcgggcagaacgtggccgatttcctggctgccgacatgaaacggggcatcattccctccacattcctgcctctccagtccggcgtaggcaacatcgcaaacgcggtgctgggcgccctgggccgcgacaagacgattcccgcgttcgagatgtacacggaagtcatccagaactccgtcatcggcctgattcgggaaggccgcgtgaaattcggcagcgcctgctccctgaccgtgacgaacgactgcctggaaggcatttacagggatatggactttttccgcgacaaactggtgctccgtccctcggaaatatccaacagcccggaagttatccgccgtctcggcgtcatctccatcaacaccgccattgaagccgacatttacgggaacgtcaactccacgcacattggcggcacgaagatgatgaacggcatcggcgggtccggcgacttcacgcgcaacgcctacatctccattttcacctgcccgtccgttgccaaggacggcaagatcagcgccatcgtccccatggtttcccaccatgaccatacggaacatgacgtcaatatcattattaccgagcagggggtcgcggacctgcgcggcaagagcccgaaagaacgggcccagaccattattgaaaactgcgtccacccggattacaaaaacatcctctgggattacctgaagctgtccgacggcaaagcccagacgccgcaatccatcagggccgctttgggcatgcacgccgaactggccagaagcggagacatgaagaatgtcgactgggcccagtataagtaattccgcatgccgtcactcgcattggcatccatgaattcacgttaacccctcaggaccgcttccgcaaagggagcggtccttttccttttttctatcccctctactccttttcttcaccatgaactggatgatttacccggcagccagggctttcatcaaagtctgcgccgttcttttcggcgcgggcgcaacagcagcagccctcatccatctgttcatgccttttttcctccgctctccccggacagccgcgcccttcctgcttttgggaacaggggcggaattgctctccatcctttccctgtccttcctcatgttctggggcgccagagttctgctggcctcccggggaagcaagataacaagaaatctgagcatgctggccttcctgcccgccctgtacgccctcctcattccgtttgcgggcatgcccgcctcatcgcaatatacggaaatggacagggtttgggaggccttcctccttctggcgtccgtcatttctttcttttccttcccttatacggcgggatacggcgccgcaggcaggagattattcctggcctggggcatctcggcggcaggatgcggtttgcagagcgccctgttttttcttgccgtcctgttgcgtcaattcctgaccacagcagttccctccctggcagcgccagttgcatggctggccgttcttttgtcctgcggcctggaaatcatgctggcggccctttccgtcattctggcgcggcgcctgtttaaagaggtcatgtccatagcgtccatgccggaatcgattgatccctccatgccgggcaaccttccctgacttcccccctgccttcatgtttgcagccagttggaaggggttacccccagtccgcggcatgaatacgcgaaccgctcacggcagccttcttccaacccggctgccgcatcccggcatgaaaggcttttacggctttgcgcaaaaagccgtccggaaatttccgccggtggaacggaatccgtatggaaagcattgccggaaagcaacccgccccaccccggaaagccgcgggttcgcaggaacacccctcccgtttccacgccggcggcagacagccctatttcaccaattcatccagataacggccataaccgttattattcatggctccggcctgggagcgcagcgtttcctgggaaatccagccgttattaaaggctatctcctccaggcaggctaccttgaacccctggtggtgctccagagtacgaacgaacatggaagcctccagaagggtatcgtgcgtgcccgtatccagccacgtataaccgcgcgccagtttttccacgcgcaacaggccctgcttcaggtattcctgattcacagaggtgatttccaactcgccgcgggaagacttgggaatccgtttggctatctccaccacccggttgtcgtaaaaatagaggcccgtcaccgcaatatccgatttgggcctgagcggtttttcctcaatggaaaccgccttcccctcctcattgaattccactaccccgaaacgctgcgggtcatgcacctggtaaccgaaaatggtcgctccgctcgtcagttcggcggcccgcctcagcttctccgtcaggccgcgcccgtaaaaaatattgtcccccagcaccagggcaacggaatcctttcctatgaactcctctccaataataaaggcctgagccagcccctccggcctgggttgttccctgtattcaaaggaaacgccgaacctgctgccgtcccccagcaaatcccggtacaggggcagatcccggggcgtggaaataacaaggatttcccgtattccggccagcatcagcacagagatgggataataaaccatcggcttatcataaacgggcagcaattgcttgctgacggaaagcgtaacgggatgcagacgcgtgccgcttcccccggccagaacaatacccttcatatcaaattcctagccattggttccaagacgttccaggcggtattccccggacaggatgccccgccaccattcctcatggtccagataccactgaatggtctttctgaatccggaagaatggtcctggcgcggagtccaccccaattccctccgtattttggaagcgtcaatcgcatagcgcaggtcatgacccggcctgtcctgcacaaaggagatttgctcccggtagctccggccgtccggccggggccgcagttcatccagatgggaacacagcagctccaccagctccagattggttttctcgttattgccgccgatgttgtacgtttcccccggttttccgcaggaaacgaccgtcaacagagcctcgcagtgatcccccacatacagccagtcccgcacgttttcccctttgccgtatacaggaatgggttccccgcccagcgctttcaggataacgacgggtatcagcttttccgggaactggtaagggccgtaattgttggaacagttggtgatcagcacgggcagtccgtacgtatcgtgccaggcgcgcaccaggtggtcgctggaggccttgctggcggaatacggggaatgggggcgatacggcgtggactccgtgaacaggccttcctttcccagggagccgtacacttcatccgtggaaatgtggtggaagcggaaacgctcctttttctctccctccagggaacggtaatattccagggcggactgaagcatggaaaaagtgcccatgacgttggtggtcataaaatttcccggatcgtcaatggaacggtccacatgggattccgccgccaggtgcatcacccagtccggagcgtactcccgcaaagtgcgccgcatcagggaagcgtcccggacgtcggcgtgcagaaagaggtatgccggagaatccgccgagccgtccagtgaatggatgttgccggcataggtcagggcgtcaatattcaggacttcatggccgcgctccagcagcagcctgaccagattggagccgatgaatccggcgccgcccgtaacgataactttcatagcactgttttcagggaaagatgcggcgccatcatacagcagcggcgttttttttcaaaacaaatccgcccatgccgcgggaacgtggcggcatgggcgggaaaaagcgggttccgtaaccgctgagacggctagcagctcagctcccgacaaaggttgatgatatcctggttcacggagtactgctgcccggctacggaatccagggaggcatagccgtactggccgtcatgatacaccatgatctggttgatgtccccgttgttcagagcttccacggcgcgggtggcaaaacgggtgcccatcaggcggtcacgggcggtgggggaaccgccgcgctgcacatggcccagcacggtcaggcgggtatccatgccggcgcgttccgtcagccagcgggtcaggtactgcgccacgcgggtgccttccgccaccacggcaatgatgcagcttccttcctcattgatgacaggctggaggcgcttgtaaatggattccaggtcatacggaatttcagggacaatgcagatatccgccgcgctgcaaagagcggtggtcatcgccagatagccgcagtcccggcccatcgtttcaatcacgaaagcgcggtgatgggaacgggccgtatcacgaacggaatcaatgcaatccagaatcacgttctgggccgtatccacgcccaggcagtagtccgtgccggcaatgtcgttgtcaatcgtggccggaataccggcaaaaggcacttcaaaatcattgaaaaagtcgttcagggcgcggaaggaaccgtccccgcccatgatgatgagcttgtcgatgttgcgtttcttcagatgttcgtaggcctgcttgcggaattcgtagtcgaaaaagcgcttggatcgtgaggaacggaggagagttccgcccctgtagatcatatcgttggtcagttcccgggtggcttccttgatttttccatcgatcagcccttccaagccgtcataaacaacgtacgggttcatcccaagctggcgggcatgatccactgccgccttgatcgccgggttcattccggcggcatcaccgccagatgtcataatggctattccactcataagtaataaggttaacttgtccggggggaaatgttaccgggcggaacaaataatgcaagcgcggagtttttactggcgcaataaacggcaacacttcatgatgcggaggcatgaacgacactgcagcagccattctgaaagccacggccgccctccgggacggcacggagaagctccggttcgaatccccggtccatgttacctacaaccctctcacctatgcatgggggccgcatgaacagtatgtgcgcacctacggaaacggggaaaagggccatctgttcctgggcatgaatcccggccccttcggcatggcccagacaggcgtccctttcggggaagtggacgccgtcgtcaactggctgcacatccgcggagaagtcggacggccggaacatacccaccccaaacgtcccgtggagggtttcggctgccccaggtcggaagtcagtggccgccgcctctggggacttttcgcggaagctttcggcactgcggaaaacttcttccgtcacaattacgtggccaattactgtccgctgatctggatgggagccaccggagccaacattacgccggacaaactgccggcggaacagcgcgccgccgtggacgcagtatgcatggaacacctgctttccctcatcaccatcctgaatccccacacgctggtgggtgtgggtgcctacgccacgcagaagctgcgggacgccgcctcccggctccccggcaaaagcttcaccatcggcacgttgctccacccaagccccgccagccccatcgccaacaagctctggccggaacgccccatccagcagcttaaggaactgggcattttataaaaagagcggaggaggtagagtggaaagctccgtgacatggaaggaatcaccagagcgacaggccggaaatcggcagttcatcttgttcccctccaaaactacatcgctttgaaggaatatccggcccccttcactggcttgattcgcccagggacacggccttcctgacggaagaaatgcacgccggcatctaccgggacggagaagaacttaaacgcctccccacctccgccacaaaatcccccctccaaatcaatcatcattcttagtctgaaaaccctccgctctcccccgcaggcctttttactggacagggagaaaagggttccgtacagtttccgcgatcttcaagcgttccgaatttatggcaatttcagattacatcgtgaccattggcctggaagtccactgccagatcaagacaaagagcaaaatgttctgctcctgcgagaccggctttggctttgaacccaatacgcgcgtgtgccccacctgcctggggctgccgggcgccctgcccgtcctgaatgagttcgccattgaacgcacgctgctgaccggcctgatgctgggatgttccagcccggagatttcccaatgggaccgcaagaattatttctatccggacatggctaaaaattaccagacctcccagctggatcttccgctgtgcctgggaggggaagtgcccctgtacccctggtcctatccgaatgacgtgatcaaagccggcgtccctcctttccgcaccgtgaagctgacccgcatccatctggaagaagacgcggcgaagattacccatcatgccaattattccctgatcgactacaaccgtgcggggtccgccctgatggaaatcgtttccgagccggacatcgacaccccggaagaagcctacgcctacctcaagtccctccagcagattctgaattacggggatatctccgacgcggacatggaaaagggccagatgcggtgcgatgtgaatatttccctgcgtccccacgggcaggaggaattgggtgccaaggtggaaatgaagaacatcaactccatgtccgccgtccgcagagcccttcattatgaaatccggcgccaggcggaagaactggacatgggcattcctcaaatccagtccacccgccgctgggacgacgaacgcggagaaagcgtcgtcatgcgaaccaaggaagacgcgcacgattaccgttacttcccctgtccagatctggttcccgtacgcacggccccgctggtggagaaagtgcgcggtcagattcccgaactgcctcaggaacggcagaaacgcttcatggaagaatacggcctgagcgaatacgacgccaacgtgctggtgggagacctggaactggcacacttttttgaagaagcggcgcggggaaccgccagcggcaaaaaaatcgccaactgggtgattaacaacatttccgccgtgctgaatgaaaaaggcatgcgcccgtctgaatgcccggtgaaacccggcaccatccgggagctgatcgccattattgacgacggcaccgtttccaacaaccaggccaaggacgtattcgccaaaatgtgggatgagccggccctcgccgcagcgcaggccgccaagctgctgggctttgaaaaggcggattcctcttttctggacggcatcgtgcgggaagtcatttccgccaatccggacaaggtggcggaaatacaggggggcaatgaaaaactcctgaactggcttaccggccaggtcatgaaggccgccaaaggcaaagtcaacccgaaaatcgtgacggaagcgctgaaaaaagccctttccatggagtaaccataaacaaagagccgcttcccttcccggtgtcctctccttgcccgcagggcatcacggtttgaacagcttcctgtttccggccagggtgttccatacctgcttcacttccccggccagcgtctgcttcatcatggcaagggaaaagtccgccgcctggcccatactgatatagggaggcagggcaagggcgtccctgtccacatgcgcgtccagcagagcggcgcccggataattcaggaacatgttcaccatctggtccacctggctggatttgtccaataaaaatcccttgatgccgacggcatccgccacggcggcaaaagagggattgttcaggttgatctgccacggaatcagcccggccgcctgcatttccaattggatgaaatccagacagtcattgttatacaccacgattttcaccggcagcctgtactggacaatcgtgatgagatcccccagcagcatggacaagccgccatctccgcacagggcaattacctgccgtccggggtattccatctgcgccccaatagccattggcatggcattggccatggagccatgattgaaggaagccagcgtcctcctgcccggcgtggcgcacaggaacctggcgctccagatacagggggtgccggtatctaccgtaaatacggcgtcggatgccgcatgcctgttcagggcggtcgtgagctgttccggccggatgggagactccttgtcatttccttccatataggcgttcatctccttcacgtctctggcgtggcggttcagggcggagtccaaatgcccggaatccgtcttttcctgcaccatgttcagcagagcctccgccgtgacggaaacatccccgcaaatacccaggtccaggcggcagcggcggcccagcacttcactgcgcctgtcaatctgcacgatttcaggtttggtgggaatgaaattgaaataggggaaatccgtcccccacaacacgagcatgtcgctttcatgcatggccttgtaggcatctccccatcccagcagccccgtcatgccgatgcccaggggattgtcatgttcaaaataatcctttcccctccatgtgtaggcaatcggagctttcaggcggtgcgcgagccggacgaccttgtcttccgctcccgcgcagccggcgccgcagaagaaagtaatgcggcggtggtcgtcaagcatccgtgccagaagggatacggattcatgctcaggaacaacattctcccgcgtgtaggaaggaggatgcaccagattcttcatctccgcaggggcgtccgcaatgtctccgggcaagacgacgacgcctacgtcgcgcctggcccacgcgtgctgaatggcggacatcaaaatgcacggggcctgggaagcttccgaaaccagttccgcatatgcactgcattccttgaaaagctgttccggatgcgtggcctggaaatattccatgcctacctggctctgcgggatgtgggaggcaatggccagcaccggggcatggttgcggtgggcgtcaaacaggccgttgatcaaatggaggttcccggggccgctgctgccgcagcatacagccagattcccgctcagctgggcttccgcgctcgcggcaaaagccgccacttcctcatgccgcacatgaatccattcaatggtcttcctcctcctcaaagcgtccgtaacggggttcaggctatcccccacaatgccgtaaatccgcttaactcccgccttctccaaaatttcaacaatctgatcggctaccctgtacatgcagattagacaccagccaatctccaacggattcattcttatgtgtcatcccctccatcttttccgcaccggaaaaatgcctgaggatttcccctgatatcataaggccgccgccttttcaggcagcggcctatgaattaccagttctctggtggaaaaccgtcaggaacggcggcggcgcatcatcagaacggccaggcccaggattcccagagaagccgaggccggttccggaacctgaaggccggcaaaaccggcaatctgttccgcggaaagttttgtatccgtccactgaatttcaccccatgtaagattgggattaatccatccttggatatcagtgcgatttccgttcatgttgccgttgtaggacaacgtgtcaagcaaggaaccattcacatagacctccacagactggctttggtttgcgccagtaacggctagagtcacgttaagaaaacctccctccaaaacaacggaagtttcagaaacgtctccacggttttgggaaaaagagccggtagaagtattcaaatttccatctcccatgccaagcttggcatctgccgtcagatacaaggcatttgtcccgtaactttggcccgcactggtgccataatacccaaacagcgtggtctgggttccttccgttaaggaagaagtattcagccagagggagatcgtgtaattggaagcataaaaattaccgccgtaaggaatgaaaccgccaggaagggtactctgtgagagactcccaaacgtcatgtcttttcccaatgtaataccttcagttgtcgtcgccgtaccggcagcgtaagacgttccggccgatggttctaaagagccggaagacgccaacgccggaacggaacaacacgccgcaatggccattaatgctaatgtttttttcattttctgtgaatgatggactgagtagcaatcagagagatattccccgccctctgtatatcggattcccaatccgctctttttctcccccacaggaaagatgagaacaagctttttcaatccgctaaaaaatgtaatataattaccttctatcacttatgaatataaaaaataaaacgcagaatagattttttgtggaggttctgaagttgctgtataggaacagcaatcccttttcgcaaaatagaaaaaattgtaataatagtttcataattgaaatgttagattgacctcggattgggaatccggttgttttccctcagccatcaaaaaaaatcaacataatgttttcatattcaataaaaattaattttctttccttccatttccagaaccttcttcttgaaaaagagccttccccaaattatcctcccgctagctgtaatattatttcaccatgaaatttttcaagacaaccattgccatgacaaccctgctgggctgcctgcccacatcccccgcagaagtcgcctttccggggcctgcacccggaacagccagcgcggaacaatccgcttccggctatactctttccaataacatcctgacggccaaatttatccttcggaacggaagtctttccttcggaggaatgacttccaaactggggcccgtcgccaaggcagggggagacttatttatcatcaatcttcaggatggacggagcattaaatcctccgatctgaaagcgggaaacgtcaagttcaccgccctccagcccaatcccaaagcgttcaggctggctgaccgcttcccgggaaaagccgtcagcgccacgtttcaggctctgaacggcgcccttcgcatctcctggcgcgccgtgctcagggatcattcccattacctgcggcaggaactccgcctgacatgtacgaagcccatccagatgaaaaacatcatagcgatgcaatatgacctggtagaagggaaagccggggcgccctccgtctccggcaacgccagaggcgcgctcatcgtcaatgacctggcgttcactgccctggaaactcccatgggcatcaatactgtggggggcgccggaaatacggcagggggagaaaccgccagctggagagcggacaagtggtccacagcctcatggaccggaaatttcaatgttccccaggaactgaaaaagcagtacggagaacaggtttccagtgcggaaggcccggtttccattgacggcaaaggagcatgcaccgtcactttccagtataagggaggggacaagggcaacaataagctgaaccttgccggcgtgcagctcctctcttccaagggggccgttcttgactccgatttccacaacggcagcacaggagattccaatgccggcaacacttacacggtacaggttccctccaggggaaattacattctgcgctactgggcccagaccaagagcgaaccgattgccagcaagggggaaatcaccttttccctgcccgtgcgcacgctggaggaaaagcaggaaccccaggcggacgaatcccggctggcccagggactctggagccgtaaaaccaccttgcagcccggggaaatatgggacgtatcctccgttctcggaatttttgcccccggccagcaacgccgctccttcctggcctatatggaacgggaacgcgtgatgccctaccgccccttcatccattataattcctggtatgaactgaacatcaaccgcaacaatgattcggaccccgccaagcgcatgacggaagaacaatgcctggccgtcctgaaagactggcaggaacagttttaccagaaacgcggcatgtccattgacgccttcgtctgggacgacggctgggatgaattcaacagcctgtgggatttccacaaaatgttcccgcaggggttcaagcgcattgacgccgccgccggcaggcaaaaggccggcatcggcacgtggctgggtccggtggggggctacggagcctccaagggcaagcgtctcgcttactggaacgtgaagcatccggacaacaagatcggcaatttccagctttccaacaaggaatattttgacgcctttgtgggccgctgctcccagatggtgaaggactacaatatgaagtacttcaaattcgacggcatcagcacccacttccatgccaaggggcccggcaacgaggaggatgcggaaggcatcatccgcgtgctgaacgccctgcgcaagaaaaagggggatctttacatcaactgcactgtaggaacctgggcatcccccttctggttccgttatgcggattccgtatggaggcaggagaatgacttcggcaccatcggagcgggcgacaaccgcgacaaatggatcacctaccgcgaccgcctggtgcatgaagtttttgtgcagggctccccgctaatgcccatcaattccatgatgactcacggcctgatggtcactaaattcggccctccggcctgcatgccccgcgatccggaaaacgtcaagaaagaactccgttgcgccacggcttgcggcacttccctccaggagctatacgtggatcgggacctgatgaacgccaacggaggagtcctgtgggacgaactggccaagggaatcaaatggatacgccgcaatgcggacgttttggacgacgtgcactgggtgggcggcaatccgtggaacaaggaaactaacgaaggggccgtgtacggctgggccgcatggaataaaaacaaggccaccctggctctccgcaattcctccgaccaggaaaagagcctgaccggaaccctgcgcagcattctggatatccctgcgaacgtcaagggctccatcaccttcaaggattcctatgacgaccagcggacgctggacggcttctccggcagttccgtagacattgacaaggaaatctccttcacgctgaagccctttgaggtgctggtgtacgaaggaggaaaggttaaataaatcagccggcccacacggccggccaaagccggaacggcgttggaaaaatatattgagggaggcgggtatcccgcctccctgcttttttcccgcccgtacagagcccgggtcagaatgttttttcaaacgtcaccgcttccagcggatcggcagggttgaccggcatcaccaggcattccgcaccttccccgcccaagtacaacatcaggcttctgccggaggaataggcgatggagacaccgtaatatcccccctttttcaccagggaccaggttccgcggcaggaagaaacgagatcttcctccagcacggaaaggtcttccctctcttccggacgggaaatccacctgccccatgcctccggacggggaaaggaagaaatctcgcacgtcccgtcttcattcaggaggagcgtggaagaactgacctggaaaaaacgcttcaactccggagggcggaaaaaacgcctctccctgggggaggattccacctcatactttccggaaagggcctgcaggtccggctcatgaatccacaggaaagttttttgacacaccgcctggcggcacgccagccccaccacggccagcagggaaagaaacgccaggacaaacgcccacagggccagccgctttctccaccacgcataaacggcggccaaccccgccacactgcccgcgcaaacccagaacccccaggaacgggaaaggaaagccagggcatccgccagcacggaaaatccatgagaaagatcattccacataggtgctccagaatctccggaacatagtcaaagtcaagacaacaatgccgtctttcaaggcacgggccgcaggctgcgtcccgctaaaaaactcccgtcatcactcctgaaaatattcctccgcgcttttctcacaggctccaatcaggtaagaagcacctgaaccatgaaaaatgcagcacatcatcaggggctttcggaacagcaggttcaggaaaaccggaccagatacggggtcaatatcctgactcccccggaaaaggaacccctgtggaagcaatttctggagaaattttcagaccccatcatcaaaattctgctggtggccctgctcctgtccgtaggcgtggcctgctatcagttccttaccggagcggaatcggccagcgtctttctggagcccgcgggcatcctggcggccatcctgctggccacctgcgtgggcttcgccttcgaggtaagcgccaacaggaagtttgaaatcctgaaccaggtcaatgacgacaccatggtccaggtcatccgcggcggcaatatctgcgaattgccccgccgggatgtggtggtgggcgatatcgtcatcctgaacacaggggaggaggtaccggcggacggcgtcctgctggaagccgtttccctccaggtcaacgaatccacgctgacgggggaacccctcatcggcaaaaccacggatgaagcggaattcaagaaggatgccacctacccctccaaccacgttctgaaaggaaccaccgtggcggacggccacggcgtcatggaagtgacttccgtgggggacaggacggaatacggcaaggtttatgaaggttcccagatagacaacaaggtgcagacgcccctcaaccgccagctttccaggctgggcgacctcatcacctgggccagctacgccatcgccgccctcatcgtcatcgggcggcttaccctgtatttttcccatctgccgggccccgtggaatggctgagcgcgggaacctacattctgaataccgtcatgatcgccgtaaccgtcatcgtcgtcacggtgccggaggggctgcccatgagcgtcaccctgagcctggcgctgagcatgaagagcatgctcgccaacaacaacctggtgcgcaagatgcacgcctgcgaaaccatgggggccgccaccgtcatctgcacagacaagacgggcaccctgacgcgcaaccagatgaacgtgtacaaggcggatttttacgggttgggggacgccaccccggcggaaaacgagctggggaacctgatccgggaaggaatcgccgtcaactccaccgcctttctggattacgcggacccggaacatatcagggccctgggcaaccccacggaaggagcgctcctcctgtggctgcacgggctgggcgtgaattacctggacctgcgggaaaacgcctgcgtgctggaacagcttactttctccacggaacgcaagtacatggccaccgtggcggaatcccccctgctgggcaaaaaagtcctttacgtgaaaggcgcgccggaaatcgtgctgggcctttgctccactgtcctgactccggaaggccaggttcccgccgcagacatgcgccccgccattgaggaacagctcctggcctaccagaaccaggccatgcgcacgctgggcttcgcgtaccgcgttctggaggatgacgccccggtattcgaggacggccgcatcatccgcaaggatctggtttatctgggcatcgccgccatttccgaccccgtccgggacgatgtgccccaagccgtgaaggactgcatggacgcgggcatccgcatcaagatcgtcacaggggatacccccggcaccgcacgggaaatagggcgccagatcggtctgtggacggaggaggacacgccggaccgtctgatgacgggtgtggagtttgagcagactccggacgcggaactgctggaccgcgtgatggacctgaaaatcatgtgccgcgccaggcccatggataaggaacggctggtcaaactgctccagaagaaggaccaggtagtggccgtcaccggggacggcaccaacgacgcccccgccctgaacgccgcgcaggtggggctttccatgggagacggcaccaccgtagccaaggaagccagcgccatcaccatcctggacaattccttcatgagcatttcccgcgccgtcatgtgggggcgttccctgtacaggaatatccagcgcttcatcgtcttccagatgaccattaacgtggcggcctgcctcattgtgctcatcggcgcattcctgggcacggaatcccccctcaccgtcacgcagatgctctgggtgaacctcatcatggacaccttcgccgcgctggcgctggcctccctgccgccggacgaatgcgtgatgcaggacccgccgcgcaagaccacggaccacatcatcacccgccccatgggccggaacatcctgggcgtgggcatcctgttcgtcgctttcctgttcggcctgctgcaatatttcaagcatgcggacattaccagtctcacgcagttcagcctcagcggctacttccgcagctacctggacttctccaccccggaacatgaactgacaggttatgaactgtccctgtttttcaccattttcgtcctgctccaattctggaacatgttcaacgccaaggcattcaacacgcaccagagcgcctttgcacgcatgggcgccagcattggcggcttcggcctggtagccctgcttatcctggccgggcagtacctcatcgtcaccttcggcggcaagatgttcaacgtggtgcccctgagctggacggactggggcctcatcttcgcaggcacctcccttgtcttgtggttcggggaactggcgcgggcattcactccggataaatccggcgcccgctcctgaaccgtccgggagaatccccccccgcgcatgacgcggacagcgacgccgcccggaaaaccttctttcaacaaagaagcccgcgggcgtgtcactcccagcatggacttgacacgcctgacgggctctatctccggccccgccgttttcctctgcctgctttccctcttttttgccgggtgtaaaaagacggaacaggtgccgcatgaaacgcccacaattatttacgaacatcccgtcaccatggatattccggtgacgggcagctgggtgggccacctggacggcgtggacaacgcctccatcgtcccccagattacgggctaccttcaaacgcagaattacgccaatggcgctattgtgaagaaaggggaagttctcttccgcattgacgattccacgttcagggaccaggtatccaaggccaaagccaccctggcccaggcgcaggcccagctacagcagttgaattacgacgcggaaatttacaggcccctggccgcggagaacgccatttccaaacagaaatacgaggatacgcgcctctccgccctggccgcggaagcgcaggtgcagcaggctgcggcggccctggccctggctgaaaaaaatctttcctatacggtgctgtacgcgccttttgacggaatagccggcatttccaggacaaacatcggcgacctggtcagcccggaaagcggcccccttgccgtcgtctcctccgtcaatcccatacgcgtcaatttcgccgtcacccagcaggaatggattcagcaggcggggaaaaacgggaatgaaggcgtccagacgggcagcaagctggacattacgctgaaagacggcaccaaatacccggaacaagccacggtagttgccattgaccgggcgttcaatccccagacaggcaccatccgcgtacaggccaaccttcccaatgcggactatctgctgcgccccggcatgttcatcatcgccacggcccggctggccaccgtcaaaaacgcgctgaccgttccggcaaaatcccttctttcgacacaggggcgctttttcgtgattgttctggatgagggcaaccacccttccatcatccccgtacaagccggaacgcaacttggagaccggcagcaggttactcccctgaaaccggattccctcaccccccaaagcaaagtggtcgtggacggtcttctccaggcggaagcagcctccagaaatccgaccgcccgcctgaaagcggtacccgccagcaaccaataagctcctcccgccatggctgatttcttcattaagcgccccatcctttccatctgcctctccgtcatcattgtcctgctgggggccttttccattctgcgcctgcccatctccgagtacccggacatcattcccccctccatccaggtgacggccacttatcccggagcggactgtgaaacggtggtcaagtctatcgcatcccccatcgaacagcaaatgtccggcgtggacggcatgtcctacatgacttccgtcaacaccaacaacgggcaaatgagcatgatgatcctttttgaaatcggcacggaagccaacatggaccaggtgctttcctacctgcgctacgggcaggccacctcccagctgccgtcggaagtcagcgcgctgggagtctccctccgcaagacaagcgggctgcccgccctggtcgtcagcctctattccccccaggggacttatgacggcctctggctggccaattacgcctatatcaatatggtggacgccatcaagcgcgtgcccggagtaggagacgtgcaggtgttcggggcaggccgctacgccatgcgcatctggctgaacccggaaaagatggccgccctgaatattacggcccgtgacgtgatgctggccgtccaggcccagaatgccgtaaatcccgcgggcaagataggcgcgcagcccgccccgccggaccagcagctttccttcaccgtaaaagcgcccggacgcctgaccagcgtgaaggaattcgaaaatatcgtggtgcgcgggcaggacagttccatcgtaagagtgggagatatcgcccgcgtggaactgggctcggaaacttacagcctcagttcttccgtaaacggcatgcccgccgcttccatcggcatttacgaggcgcccggaggaaatgccatccagctggtggacaatatcaaagccctgctgaaaaatacggatatgccgcccggcatggattacctcgtttccctggactccacgctggccgtccgcgccgggattgaagacatcgtcagcacgctggtgattgccctgggcctggtggtgctggtggttttcattttcctccagggctggcgcggcacgctgattccggcctttgccgttccggtgtctatcgtgggcgctttcatcgcctttccattgttcggcttttccatcaataccatctgcctgatggggctggtgctggccatcggcctggtcgtggacgatgccattgtggtggtggaagcggtgaagaaccatatttccaacggagaaaagcccctccaggccaccattgcggccatgaaggaagtatccggccccatcgtcagcacggcgctggtgatttcctgcgtctttatccccacgctgctgctgcccggcgtcacaggcaaactgtttgaacagttcgccgtgaccatcggcatgtccatcatcatttccgccttctgcgccctgtccctcagccccaccctgtccgccgggctgctgaaagggggaaaagctgactccattcccctgctggggccctttttcaaattgttcaacaaggggttcaacaaggcgcgcgactggtacgtggaaatctgcgccagacttatccggcacatgtggctgtccatcctgctgctggccgccatgaccgcccttctctttcccctggctaaacttattcccagcggattccttcccaatgaagaccagggctacctgttcggcggcgtggaactgccggacaatacatccctgaacgtcacggcggacaccgccgcgcggattgaaaaaatcatcagggaggatccgggcgtggacgtagtgactaccgtaaacggcttcaacctcatcagctccgtccaaagctcctccaactccttcttcttcatctccctgaaaccctggtccgaacggactgctccgggcatgacggcggacggcatcgccgcacgcctgaaaagcaggctgaacgcggaaatttcctccggcgtggcgtatgtggttccgccgccgcccctgcctggcgtaggaacgtccggggatgtcacattcctgctggaggaccgccagggcatcggggaaaaattcctggccgccaacacgtccaaattcatcgaggcggcggaaaagaggccggaaatagcgggcatcagcaatttcatgtctccctccaaccttcagtacaacctgaatgtaaacacggagcaggccactctccagaatatggacgtggatgagatttacgccaccatccaggcatacatgggaagcaccttcctgaacaacttcaatatttacggacaggaatggcaggtgtacatgcaggcggacgcaccgtaccgggacagcatcgacaagctttccatgttctatgtgcgcaacaatgaaggagacccggttcccctggattccgtaatcaacgttacgcacggctgggccccggaattcctgatccgccagaatatgttcaacagttcccagctcaacgtcaccccggctccgggctattcctccggccaggtcatgaacgccctggaagaagtttttgcccagaccatgccgtccggcatgggatacgactattccgggatgagctaccaggaaaaacaggcgcagaaaggtatcaccatcggcatgatctttgcggcatcagccgtgtttgtctttttgattctggcatccctgtatgagagctggtccctgcccgtagccgtcttcatgaccgcccccattgccatcctgggagcatttctggccctgtggataaccgggctggacctgaacatttattcggaaatcggcctcatcgtcctgattgctctggcggccaaaaatgccatcctcatcgtggaattcgccgtgctggaactccgtcagggcacggacctgctcacggccaccctggatgcggccagaatccgcctgcgccccatcctgatgaccagcatcgcctttatcatgggctgccttcctctggccgtagccacgggagcgggagcagcggcgcggcaggtggtaggcgtcggggtcatcggcggcatgatgacagccgtcttcatcggggtatttttcattccttccttcttctacctgattgccaagctcgccgggctggacaaaaaagcggcgcggaaacttcaggaaaaggagcagggagcccccgcccccgcgaagcaggccgaatgacacttccgaaaggggaaaacggctcccgcacagtttcccattcctcctacatccagaatatccaggcccagaaagccttcacgaacacgagcaccacgttaatcagcagccccacctttaccatggtcatctgagggaattttcccgtcgcgaaggccagagcgttgggaggagtggaaacggggagcatgaaggcgcaggaagcgcctatgcctaccagaagcaccagcggcgtagcagacatgcccatggcggaggctaccgtgaccatcagcggggccaccagggcggcgctggccgtattggaacagaattccgtcagcgacgtgatgaagaggctgatgatgagcaggatgacgatggggctgtgccccatggcgagagaagatacctgatccgccaggaatcccgccgcccccgtctggacgaggatgctgctgagcgtgatgccgcccccgaacaaaagcaggacgccccagtccgtatttttggcgatgccgctccagttgataaccccgcacagcggcagcagcaccgcagcgctcagcgcgatgagcgtgtccatggacgggatgccgcccaaagcagaggaaaggaaactgctgcacatccagctcccggccaccagcacgaagagaataaggacacgcacctgcctggcattcaacctgccctccgttccctccctttcctccggcaccatatccacatgcatccccagattcgggcggaggaacaggtacatcaggaagaaaacgatcaccccgaacaccaggacaatgggcatggcaatccggaaccattccgcaaaccccatgcctagttcatgcgccgcaatggcgttgggaggagaacccaccagcgtccccatgccgccgatggaggcgctgtacgccacccccaggatggcaaaaggagccgtcgtcttaagtttttccgccggaacgcggtccagaaggccgatcaccagaggaagcatcatcgccgccgtggccgtattggacatccacatggaaagaaacgccgtagccaggaaaatcagaatcagggccatccccaggctcccgcgggccatccggaggatttttcccgccagccaggcatcaattttctgttcgtgaagagccccggccagggcaaagcccccgaaaaacagaaaaatggtaggatccgcaaaaccggacagagctttctcccccggcagaatccccataaacatggcaagcaccggcaccagcagggaggttacggttacgtgcagggcttccgtcagccacaggatgccgataaaggtgagaacagccagccccctggctacctccggttccacgggaagccacttgagcatagccaggaaaagaagcacgtcacacgcaatgatgacgtaattgcggtgccctttgggagtgtcagcagtacggtggcgcataaagtaaagataaacgacgctattttctttgtacgcatcagaaaaacagtgtcaatgcttttccataaaaccccggaaaaggccttccccggaaacagggaaacacggaccagccaccggcttgagaatacgcacggcacgcatcaccgggaaagccgcgccacctcttcccgctccgggaaaatacaggaagcccggacatgcaaaaaaaccgccatgcaatcgcacggcggcttgtaaaactgtctgattgatgcacggaggggaaacctccgcccgggcaattattcggcggcgggttcagcggccttcttggcagccggctttttggcgggagccttcttggcggcggcagccttggtttcagtctttttggccggggccttggccgcagtctttttggcgggagcttccttggcggcaggcttggcatccttggcaacgggaacggccagacggataggcgcattggaattcaacttggactgttccttcttacgcttgaggtattcaatacgtctgcggcgcttggtgactttgcggatttgctgtcccatagtgataattgctatgatatttactaattcttaagagctccatgtggcacatgggcgtggatacaactaccaaccccacctcccatacgcaagcacaaagcgttattaaggcacagaaaggcggcggcaggccccggttttcccaccccgcgcgggagaggaagacaaccggggcaaaggaggttttaccacaatttcagcgcatccacccggaccggctgttcccagcgcagatggtgccggatggcggaagagatgaattccaggccgcgctccaccgccgcaaccagtccatccccggcggccagccgcgccgcgacggcggcagacagggaacagcccgttccgtgagtgctcacctcctgtacgcgcggacgctcccattgccccagcaggcagccgtccgggccggacagcacgtcccggcagtccccctccagatggccgcccttcagaaggacggggcatccgtacctgacggcgaggcgcgcggcggcctccggcagttcatccctgcccggattaacagaagaacggagcaggacggcagcctcatccaaattgggagtaagcaacgccgctcccggcagcaggagctcttcgtaaacggccaccgcctcttcccgcatcaggcggtctcccgccgtggcgatcataaccgggtctaccacaacggggacatccgccccggccagcacctcatgcaccgcacggacgatagccggggaatacagcatgcccgtcttcacggcgcgcacgggaaaatgttccagattgatgcgcacctgatcagccaccagcgcagggtccacctcctgaatgccgcgcactgtcccgggcgcctcggacacgacgcaggtgacggccgtaagcgcaaacgcccccatggcatgtgccgctttcaggtcagcctggagcccggcccccgcggagcagtcggaaccggcaatcgtcatcattacgggaatactcatggccctgtttttaatcgggaagaaagctcttgaacatccaaaaatccgcacgcgccgcctcaatgtcacaaatccgggtgggaaaacaaggagggaatgccacaatcatcccatgatgcacgcttcccccgccccggacgaacaggaattctggcttttcattcaggatgcccctctgccggccgcagaggaattgcaggagagcatgttccgcctggatggctgtttccggctgaacctttccggcgcgccggaaaacgctccggaccatgtgctggaaggagaatatctggatgaagagggggaatcccagctggacgtattctgggtcatggaaacggacgacgcgcgccaggcgttcaaaagggacggcgcggccctccggcagatagggaaccgcaccaaaatgctgcgcttcattctggaagacgaatatgccctgggccatgtattcgccatgatgcacgccatactggaacaccgggacggcctgctggtcattccggactccaggggaaacgttattctggaacggaggaaagctttggatttcctgaacagggaaatcagggaaagctaatgtttctgcgtctgcggagctgaaccgccctcgcgctccgcattcagttgaagcgctttctttttccagacttccgccatatccgcatcctgaggggtcccctttccggtgctgtagcagacggaaagcatcagcatggcgttgacgtggtcctgcccggcggccagccggagccagttgaacgccttgccctcatccgcagacacgccggaaccttccagataagccagtcccacgatatactgggaatgggcgtctccggcagaagccgcctgttcataccacttcatggcacgctccatatcccgcgccactccctgtccctttgcgtaaatgttccccagataaacggacgaaggcgtattccctccattggcggccttttccagcagcgccaggccggaagcggcatccttctcaaaacccatcttcccctccatgtaagcccggcccagcagccccatggcagccggatgttcctcatccgccgctttgtgccacagccccagagccttgttcaggtcctgatccgcgccatcccccttgaaatacatcattcccaacatgtacaaggcgttcccccgctgggttcccgggcgggcaagcccgtactcaaaccactccctggccgctacggcatcacgcttgattcccgtcccatacaggaacatggcgccaatgaccgtttccccggaatacccggacccggtctccgccacggaatcacaccaggcccgcacgtccagcggatgaacccagccattctgcaatccctccgcatacagggcagccacatcattgagggcttttacatgctcgctgccattttccttctcgcggccggcgccggccacagcagcgtccaggcgctctctccatatttccgcctctttccgcaccgcagacggcttttcccgttccgctgaaggagcagcccgcttttccccggaagaaggggcgcggtcacatccgctcaaaaaaaagaaggcgaaggaagccgcacataaagagacaacttgtttcatcatgacccttaccataagacagcctcaccaggctgccaagaagagaaatgacggaaacgccgcatccgcacgccacggaagcgcgaagccggagagccggatttcctctttttgcattgaatatttccctctttttgctctactgaaaccagttctacctctgatgaaattcattctgcccctgtatctcttgacatgcctgggcccggcgttcctggtaagtttttcctgccggggttccgcgacggaacttcccgtaaaatacatctttgagctgtcggatgaaccggtaaaagtacatcccggcaaaatagataccaaaagcgttttcttccccaaatacgcgcgcggcacatctccggaaaccctgaagcggcaggccgcccttttccaatcccatagtccccacgaagcttccaaaagcaaaccggccatcagcatccacatgaatgacgacaaaacggaaagggacgtccatgaacggtctggttatgagtttcaccatgcggaaaaccaggaagaaatagtcatcacaaccgaaacgccggatgaggaagtctggctgaacgacggggatccggacagcccctttttccatacgccccgttccgccgccaatacggaaattcgtgaaatccccacgtcttccgattcctggcccgcctggaatgaagaggaagtcaacctgcacatgaatcttccggaatcggcgccgcgccccctagtagtgcagccggctccgtccggagccatccgcaccatcatcaaatcctttaacggaaccgtttttgaggcggatgcccagcccatgcatcccgtctgggatcagctcccgcccggatacgttcctatcccggctctcccggcctatcagcccaccttattgaagaaattacaatagaagggggcagaaagcctcagaacttgaagcggacagccccgaaaacagaccatccgttaaaggctttggccgttgccgagtccacatggctggtgacatactctacagccagcatcagcttgaccgcattgacggcctccggacacagatagcaattcagccccaggtaaaaggaatgcatgctgtccacccatgcgggataatgggtgacgctgggcacataacgggtattcagcttcacagaacggtttccaaaggaacactggtattgaaagacgccctcaaaatgcggggaaatccggtaaacgggctgcagaaccaggccgtacacattctttgcaccgggctggcctacaattcccacgcctgccagcaaattccccatgatggagaaagcgccgcggctggcgtcccagctcagggaaatcacgtcctgcgcgcccgttccgcagtaatcggacgtggaagggattttccttccccgccattccgtaaaattatgggcatactggtaccccagaaactggctgtcccacatgggagaagccaccttccacttcatggcgttcaggataaacaggttgtctgcagaatgaaactggatctcatccttcaaatccgtaccgttcgcattcaggtaaacgccgtaggaatggtacaggctcttggcatccttctgaaaattggcctccagaccccagttggaaatgggaatcaattcattgcacagggcggatctttccactgttttaatccgggaggaagccaggcaatactccgacgtcaggtgaggcgtcagcttaccggccctgaacttgacgccgggcatggtcttttccagataaagttcatacagggaccactccgtatggctgccgatccattctccccgcacttcacggtgccggccttccaaatcccccacattcgtcagattggacaggcgccaggaaccgtcccccatcaggatgtcgccgcccaggtaagcgcgcctccacccgttgttatggccgccggaagacgggcagaatttattggccccattggggctgacggctgctgcctgatactggccaatcagcgtcagcttcaccttcctgatccatgaggaatcattccggtacagcaccggaccgcgatccagcacacggcacagggacggcagagagcccccggaaaccggctgggactgaactgctcccacaccggcttccgccgccggaaaggcggcataccaacaagcggccaacaggaacattcctggaaaaacaagcttcatcataggctaaacaaacaaattgggcgcacatcttaaggagccctctccgaaaatcaagcccggatgctcctttcgacattgttgttttctgaaagggttgttacgaagaacggcaatgatggacgcaccagtgcgcccatccggaacgtctccatcagaaggccagggacgcaggtttcagcacggcttggagttacagctacatcggcctgttgtatctccggcctgatgaaccgggccatttcaatcacttcctgtacgatgaagaaacaacgatgcagcagcctggcatcatcgcgaacagttaccggcaccaaatcatcactccggcaagctttccctcccggcccgcatgggggaacatgcctgaataattatttcccgctcctgcggggaaaggccgtaaatgtcttccatcagcccattcatccgctcatccccttccgggcaatagcggaccgcgagagcgtccgccagcccttccacttcccgcagcagggacagaccggggacccggatgggagcccggaggacaggggcggtatccatctggaaaaaatccccctgcatttttccccggcggagaaaccaaaactgcatcaggcgcgaattgaacagggccgccagatatttcatgctcacgcgttccgagcgtatcacgttgaatgccatcatcacataagcttccttttccgtataggagaaggttggacgggcacacttcctgacagccagaattttggggccgggccggaaaaaacgttcctgccggggccagtgcacatggtaatatttcatgcggcccatgcgtgtttcccgccgggcctccatcaggggacggaatttttccaaatggcgcaaaagcgtaacggcctgctccgctccgttggacggagtcagatataacagcaccttctccggagctttcagtgcatgccgccctgcctggacaggttcatacagaggtttgagaaaacgccgctcccgttccggcaacaggccaaaatacccctgaggcaagacaaataccccatcccccctccggattccgtaccgccgcactgtttccggacccagattctccagagcacgggaggaaacgacgtcaggattcggcacaatcccctgcgtcatttcctttgcggcatccagcctgaaattccggcaggcatccatcttttccagaagatgccgctctgctgcagagcagaaggacaatccttccctgacgcacgttccagcatcttccggcaggggaaattgacggtacggctcatgttccagaaatgattccacttcattcacggagccgccaaaacggcggtattccggaaccagacgcttgccttcctctccctttttctccgccagaacagtcatggtatggacgcgggcggattcaaacacccggcaggctccgaaatccgacaagcgcagcagaccgcaatcttccagcagcttgcggcggagaaaggcggctccggcattagccatccacttgttgggaacgaccagatgcatcacgcccccccgcttcagggcatccagccccacacaggcaaacacgtaccagtaatccatgcgggaagaacagtaggaagcaagagaagaacatttcaagcggtcaaataattccttgttccctttttccccgacaaaagggggattgcctatcaccaggtcaaagcctccttcctccatgaccgttgaaaggccctgccgccagacgccggaagcggacatatccagactgtccccgcacagcaggcgatcccgtaactccccctttcctccggcggcgagccatgcgcaacgaaaacggaaacgggccacttccaacgcctccccacagacatccactccataaatattctcttccaaaacggagcggattaaatcggactccggacaccctggttccagacgctttctgcgggagacaagctcccggagcattcccatggtgaatgctccggccccggcggataaatccagcacacggacacttcccagcaacccggcttcttcatcaccgctcctgggagcaggcaatctggattccagccaggaagataccgcttcccgggccatccagcgaacaagaaagccgggggtatacaccgtcccggaacggcgggcatccgtcaggaaacgccccagcaatccttccagcacggaaggagtaacagcccggcagacatcctcttccctcaaggaaaaagcgaatccccccggcagccggccctcacggccagcctgccgtttcagcaaattgttcatcaccgcctctttcaaccgctcccaggtttcaggacggcccccgcagcccttctccacggcgaaacactgagctataaaacaatcctgaacgttccgctccttcactgcggcattcgtacactactggaacgggccgcgcaatcaaaaggagaaattgtccgggaagccagcttcagaacattcatgcccggaatgccctttcctggacaatcccggcgcgcttacaccggcaatgcctgtttccatggaggcaacaccccatttcataaatccggtttccctatcaggtttctcaattcgtttctctattcccttattttggaataaataaaatccggctttgccatcagcaagccggactaaaaaagaaatggtaccccgtcacgggctcgaaccgtggacaaactgattaagagtcagctgctctaccaactgagctaacgaggcactggaataacggcatcccttgcaggaacaaccggatggtaccccgtcacgggctcgaaccgtggacaaactgattaagagtcagctgctctaccaactgagctaacgaggcatgtatccggtgattcccccgcgacaagcaccacccatgaagatggagccactggtcggaattgaaccgacgacccacgcattacgaatgcgttgctctacccctgagctacagtggcatcgcgagaagcgcacgagcaagtaatcataagagtccccttttagcaagtcttttttgcaataagaccgtttttttactccttgaatgcggaatagaagccaagagcggcaggtgacagtagaagagcttgcataggcgcgggaaacatggtggagttcatgtcctcaaagagcttttctttccctacttatcatgaaggcatattacattttccagcaggcggacgaagaaacaatcagcaacattctggactggatgcgcaaccaggaacgcgccatttaccgcgccgccgtgcgtgaacttggagccctgaaaaaactgcgccccgaatttatccagcgcaaacctcttcaggaacaattttccttcatcaagaaaatgctgtcgtggaaacccagcaatgaaatcggtgatcatctgcttcaggtctggctgttgcgcaaacaccaggacatgctgattacgttcctgaataccctgggcatcccccatgacggcaacggcattgtcaatgaactgccggaaacgctggacaaggacaaactcgccaaagctgtggacgaactgtttgaaaaatatcctgccggcgtagcgtccgtatacctccagatgttccagctccagacggaagacggctgggatgaactggccgaagttctggcgaacgacccccgcgtcacgattcgctgacgttattctcctccgaggcataacagggccgctccgtcccggagacggcccttttttatggaggcaaacggcctacctgccgctgttctccgggctcctggagaaataagcgtaggaacgcgcggaacctgtttgaaacagctgtaatggaaaacatgccggaagcgcaagcccatcaggaggaggtactgtccgtctgttccggatgaaatgaccacccctcatccccgtggtacaccatcatacgggacatgccgccgtcaatgaccagattctccgcattgacaaagccggagctgcagagaaagaaaacggccttcacgatatcttccggcgaaccgatgcgtccggaagggtgctgaaaaccgtcttccggagacaggacgccgaaagcccccgtgtcaatccagccaggactgatgctgttcacacgaacgccgaaaggggcgaggctcatggcgagagcatgagttaaagaagtgagggcgcccttggccgcgctatagctttccgtatccttctgggacatggatgcgcgggtggaagcaatattcacgatggaagcgccgcgggaaaaatggtcgcgaaataaaaggcttagcagatagggagcggaaactcccacgcgcaaaacttcattgaattcctcaaaggaacagccggacagaatgccgcgacgcgtgatgcacgcattatttaccagcacatccacatgcccaaagcattccaacaccttttccgcaaaagaccgcacgtcctcttccacgccagcattgcccgtcacgcaaagatgcccctctcccggcagttcctccagcagggaggccgtttcctcatgcttcacatccaaaaccgccacccgggctcccgctgcagcgcaggcttccgcaatggcgcggccaatgccgcaggctcctcccgtcaccaccacggtactgccggaaaaatcaacatccttcataggctgattgtcatatcccgcccaagaaagtcaatcatcgctttccgcgcatacggcgctcaatgcgcgtacattacatcgcggtaaagtcccatggccctgaaaagaagaggagaacgggttactacgtccgtctccgcaataagacgggctatggtgctggaaacggccatttccgcttcctccgcacggcggctgatacgctccatgtccctggttttcaccagattcatacgtccagatttctgaaaatcatcaacaacatagcgcagccttttcaacttggccaccacttccaccaactccatggcgcaccggtcagccgttccggcatccttgatgccgcgaagaagaaagtcaactctctccaggcacaggcagaactcctccatggtcacgacagggtcggaccagaactcctgaaaatcgatcagcctgggctgctctattttaagccccgccacagccttttgcatggaaggggaaccatacatcctggccgtcgtcagcttcaggagcgcccggaaagcgcgtttgcgctcatcctccgcctgctttctcatcttttccagcccctcatggaaatgccgttcaaaaccgggaatccagtcaccatacttcttctccattctggcaatgttgttcatctgctccctgaccattcgtccctgaagggctacagatacggcataggcttccgccgcaactttattgtcaatcccctccagcatgtccaccatggtggaatactgttccagataagccttcagaaacggctttatcttgttgttcaaatacagggccacccgttcgtccgtcaggctgagaccgcacttttccagatcattcctgatgacatcggaatcataatacctgaattcatggagcttcagtattcccgacatcatccggtcgcgggccttgtccacgcgctcccggagaatggaatgaaaggcgggatgcatcttacgcgattcttcatgcacgcgcggattcagagccatcaggcgcccgcaattcatatcgtaaaatttaaacttctccgtcaggcgcccaagttcattcatcagggcctctcctgcggtacggtcctggatggaaacgaccagatccgtcatctgttccacttccttcaggcgcagggaaagcagctcttcataagattccaccggggaaagcctttctgacttccctgcttccgcaaccccggcctcctttcccttatccccgcaggaacacaaacacagcgccagcaggagcgcgcctcccatcaacggcaaattcgggaacagagaaaaacaggagctaagcttcatgagaacgtagcgttgaggagggagaatgaaactccggcccgcatcgcggcaccggaactaccgtaaaaaagcgtcatcaaagttcaaggccttttcatttcatccgggaaaaacatttccgttcctttgacgggaaaaatattcatttaatataatgaacactcttctgaatcgggatgtcacactcttttatccatatcatcctgtctgccgtgattcttgatattcttcaatacggacatcctcttttgagagaggaatgcgggcccgtggttcatatcaacagggatatcctttccttcctggacgatatgcaggaaaccctggcccagggaggcataggcctggctgcgccgcaggtgggcaggcccatccagctggtcaccatcaacatcctttccacagacgcaaccactacctggctggaagtggacggatgcccaactacgttgtcccgaatcatgcccttgaattttatcaatcccatcctgcatcccttcggcaaaaaagtgccgtaccgggaagggtgcctgagcatcaccaaagtatatgcgaacgtgatgcgccgctcctgcgtaagggctgttttaaccatgatggacggacggactgtgaccgtgaaatgcaacggactgctggcgcgctgcctgcagcacgaggtagaccaccttcacggcggcctgtttacggatctggtttcccccggtgaccatgacaaggtgatacggaggctcagattgacccatccggacgcttttgaagaagatgacgacagctacgctcgccgcatgaaggaaaaacgccgcgcccaggcatggaaagcccggatgccgcagcctcccggaaaaacagcctgacgttcaggcaacaaacctatcccccctttttactgcccttccctaaaaaacgccccggtctccctccaggaaaccggggcatccataatcacatggaaagaaaaagagagaatcaaacaatccagtccagaacaaccttgccggattttcccgaattcatggcttcaaacccttcccggaattccgtgtagggcagacggtgcgtgatgatgggcgccacattcaagccactgcggatcatggaatccattttatgccaagtttcaaaaatttcacgtccataaatgcctttcatcttcaaccctttccatatgaacttattccactcgatgctggaaccatcgggctgaatccccagcagggaaatgttggctccgttgcgggaattgtcgatgatgtccttcaggcaggacggagcgccgctcatttccaggcacacgtcaaatccctccgtcatttccagttccttcatcacgtcttccagcttttcacgggtcacgttcacggttcggtccgcccccagcgttttggcaagacccaggcggaaatcattgatgtccgtaataaccaccgtcttggctccggccttcttgcagacggcggcagccatgcagccgataaccccggctcccgtaatcaggacgtcctcgcctaccagatcccaggacaaagccgtatggacggcgttgcccagcgggtcaaaaatggaggcgatttccatcggaatgctcttgtggatgcgcaccacgttatcctgcggaatggaaaggtactccgcaaagcagccgggcctgttgactcccacaccctttgtgttgggacacaagtgcttctgccctgaacggcagctgcggcaatggccgcagacaatatgcccctcaccggaaacaatctccccgggcttgtattccgtcacggaagaacctacggactcaatcacgccgcagaactcatggcccacatgcatccctaccggaatggtctgctgggcccatttatcccaattccaaatatgaagatccgtgccgcaaatggctgttttatgaattttgatcaggacgtcattcgggccgacttccggcataggaacatccatcaattccaaaccggggccagcctgcgtttttacaagagctttcatgccccccattcatgctctttttcccctgcgtcggcaagctcaaaattcatttcggagcgccgaaaaagcctagggaacggaggcttccgcccccccttcccttcccatggaaacgcccggagcagcggcgggcgacaaacgccggaaagacattcctgttcaatcgacaattcagacacacacgcaatttgccctttccaacaggaaggaatcatgataccaaggcgtgcgagttctccttttgaacactttactctatttacagaaccatggcgaaatcatttttacccaccattttcgagcacccgtatgaaatagaccccaaatatgggaaaagcgttgcgtacttctccatggaatacgccattgataattcatttaaaatctattccggcggtctgggctacctgtccggctcccatatgcgcagtgcgcatgatctgcgccagaacctcgtaggcgtcggcattctgtggagctacggctactacaaccagatccgtgcggaggacggatccatggccacgcaatacatgcgtaaaaactacccgttcctggaagatcacaacatcaaattcctcattcatgtctgcggagctcccgtctgggtaaaagcctacttcctgaatccggaaacattcggcactgcgcccatgttcttcctttccacggacctggaggaaaatgacgaggaaagccgcaatatctcccgccgcctgtacgacgccaacggcttcacccgcatcgcccagtacgtgctgctgggcaaaggaggcgcccgcctttttgacgaactgggcattgaaccggaaatctaccatctaaacgaagcccacggcctggctgcggccttccacgtgcttgccaagacgggcagcgtggaagaagtgcgcaagcgtttcgttttcactacccataccccggaagaagccggcaacgaaaagatggacgtaaacaccatgaatacgttctccttcttcgacgggctctccatggaacaggtgcgcgccgccgtaggcatgacggacaatacgttcaactacacgctggccgccttgcgcctctcccacatcgccaacggcgtttccaaactccatggagaagtatcccgccagatgtggaaggactatgagggcatatgccccatcatccatatcacgaatgcccagaaccagaaatactggcaggatccggaactggcggaagctttccaggcccgcaacaaggaagcgttcatccgccgcaagcgggctctgaaaaaagccctcttccgcatggtgggtgaacaaacgggccgcgtctttgacccgaactgcctcaccatcgtatgggctcgccgttttgcggcctacaagcgtccggacctggtcaccggcaaccccacgatgttcgaacgcatgctccagcgcaccaactatccggtgcagttcatctgggccggcaaaccctacccgatggatcatggcgctattgaaatcttcaaccgcctgaatgacttgacggccaaatatccccgttccgccgtgctcaccggctatgaactgggcctgagccgctacctgaaaaacggctccgacgtatggctcaacaaccccgtggtaacccgggaagcatccggcacctccggcatgtccgccgccatgaacggctccatctccgtctccaccaatgacggctggatctgtgaattcgccaaggacggagaaaactgcttcgtcattccggaagcgcccgcccatctctccccggaagcccgcgaccgctccgaccgcgataacttctacaacattctggacgacaagattcttcccctctactacgatcacaacgacaagtggatggacatcgttttcaatgcgatgacagacatctatcccgaattcgactccgaccgcatggcggatcagtactacacggaaatgtacaacagctaagatacagccttgtccctcttacgcaacggccgcctttcttcgggaaaggcggccgttctttttgaaaccggtgtcaaaaatccacgggaagcgggccaaacctacttgggtacttcctcctccccggcctcctccgccaccttgtctgcgtcccgcttatgacggtgcgcaaaaacattctcctgctgccatacgcgggaaaaagcagacgtgatcagccctgtggaaatagcaatgatggacacggcaataaacataatcaccccggtaaaaatacgccccatgggcgtaataggcaccaggtctccgtacccgaccgtactcaacgtttccacggcaaaccagagcgcgtcaaaaaaggaaccgaatttctcgggctgggcatcatgctctgcaatataaattcccagggaagtgacgtacagcatgaacaggatcacggagaaaaacagaaaaaactcatcccggatcaggtagaaagcctttttaaaactggcggcggtttcattaaaccgggccaacttgaaaatagccaatatgcggacaatccgcagggaataaagaatctgccagtccgtcccgaaaaacatgcccaggaacggcacgcagacaataaaatccagaatacccatgccgctgaaaatataagccttccgcggtttggcgcacagcacccgcaggatatactcaaacatgaagaaatagctgatccagtaattcaccttggccgcgatacggcctaccagaggatgaatatccggaatggcattcaacgtgtacagcatgaaccataccagaatcagtaccctgacaatgttctcccagggaccgaaattggcagcgcccagcttggtgcgggtaatttggggcatggcgggaattaggaacgatgggcggccttccactcgtcagccttgaagccgacgcatatctttccattggtaataaaaatggggcgtttaaccagcatgccgttggaagccagcagggctatctgctcatccaggctcatgtcggcaagctgatctttcaacttcatgctcttgtaaagcaatccactggtattaaaaaacttcttggccggcaatccgctcccttcaatccagctccgcagttcctctgccgtgggattctgttccacaatatggcgatcctcataagaaattccctgctcatcaagccacttctttgctttctggcaggtcgtgcatttgggatattcaataaataatgaagacatatccgcacgctagccccgtaaacacaccgggtcaagcggccagcgcagccatcccgacgtcatgacttgattggaaggctgccgatgtacccgccgttgaacacaaaacctgagaacgaaagcccggaatgcgtgcggataccgcagaaattctatattccggaacattaaagcaccatggcgcttcccaactgcgcgatggaaacgggattggcctgacgctcccggagcgcccccgccagagcctgggtagccttctcctccccatgcaccagaatgatattcctcttgggccccccggtcctgtcaaaatactccagcagttctccatggtccgcatggccggaaaaggaatccatctcccgtattctggcccggacagaatattgtttacccaggatgggaacctctttccacccatccataatcttgcggccaagtgtatgttccgcacaatagcctacaaaaagaaccgtatttttcggatcgccgatgttattcgccaggtggtgaagaatgcgccctgcttcacacattcctgaggcggaaataataatagcctgcccgttcattttattcaaagcctgggactcgcccacggaacggatcaaacgcagctgttcaaaacaaaacggatccttctcccggaacaggaaatcataaacctccttattgaaacactccggatgaatgcggaaaatctccgtcgcacccactgccatgggactgtccacatatacgggcagcaagggcagagttccttcatggtaggccctgttcagcagataaagcagctgctgggtgcgttccaccgcaaaagccggaatataaacgcagccgcctaattccagagcctccttgatagcccggcagaacgtctcgtcatcacgggagggggcctcatggaaacggccgccgtaagtgctctccatcagcaaaatatccacatccggaacagggacgggatcgcgcagtaattcgttatctccccgccccacatccccggaaaacaggaaacgcttcttccgcccgtcttccctgtcctcaatatccaggcacacttgcgcagcgcccagaatatggcccgcatcataaaacgtgagtgtcacccccggaacaacgggaatgggccggtcatacccgatattcacgaactggcgcatgcaccgctccgcatcctgttcggaataagtaggataaacatccggctgatgaataccgcggcgcttgttcatcttattgatgaatgcgcagtcgtgctcctgaatgcgggcggcgtccgccagcatgagctggcaaagatctctggttgcaaatgtactgtaaatatttccctgaaacccctgtttcactaaattgggaagattgccggaatgatcaatatgagcgtgggacagaactaccgcatccacctccgccggggaaaaataggggaaatccttattgatatgccatgcctcctcacgccgcccctgatacatgccgcaatccagaagaatccggcacccgttcacctccagcaaatgctgggagcccgtcgtcgttcccgctgcgccgcaaaaatgaattttcattaatacatgtgtacaacaagccagcgggcaacgcaagaaatcaatacctgaagcctttcattcaatataccctttgaaagacgggaaacatcagccgcaaaatccatgccttttcttttttccaggccataaaaagagaaaaaccaataaactgcaccattcctccttctgtacagtattcctgtgaacatgaaattgcacttctttcccgcccgggttgcggtttccgtaaaaatgcatccgtcaaaaacttccccttcgcaaggcacatgctccatcacgaatgcacgccggaatacccgcatccaggagagccctccggtatcactgccaaaaataaaacctgcaggttattctgaaaacattccgttctgattgcaacccgcctcctgaaaaaagcggccggcaaaaagagtcccgcctaatcttaatgaagcctttcagctaaaatgaacaggacaggaaattcccgccctgttcataatgccgttaaattgcaaaaaattacttgtcctccggtttggagtccactgtcttctccacctccacgtcaatgggctgggaaagctcggaagaaggccggacctccgttttggaggcggaagcatcactcatggtctccttctcggtcttcagcagttcttcttcaaattcagatttggccttcttgaattctcccaggctcttgcccagtccgcgggcaaattccggaagtttctttgcgccgaacaaaaggaaaacaatcaccagaatggcgataatctccggtgttcccagtccaaaaatagctaacatgttcatcatggagtactacagtatttttaacagatttttttcatgccggatacctcataatacgcttcatgcgtcatcagaggcctcccgttcctgtttctgctgttccgcaagccttctggcggcaaaacgctgaaaacgccagacaataataaatattgccagcaaaaagatgcctgagccgccccacaacagccaaaaagcggcggaagccgccttttcatcccccatttctccagcctggttccaataataataggataaaaccggattccagggcagtgaactgtccggcagaagatggagacgcgccatgcggttcatggccggcagataggcagcctgggcggatgctttcatcagggaatctccctgagcctcatcaccccgtgtataatatacctgggccagcatgtacatggccttgggatcccctgtagcatccgccacacgccgcagcagcctgtaggcctcatccgcatccagttccccgcccttcccgttctggagcagctccgcggcctttagtgccgcagggaaataaccggcggcggcagcctcacgatacagagccagggcccgggccgcctgttctgcggaaggagttccctccagcagcatatccgccagggcagccatgctgtacggatccttccattccgcccctttttcaaaccaatggaaggccttttcccggtcagggggcaaatacttgccgtcccggaacattatgcccagttccatcacggctcccaaatctttacgggaggccgctttctcaaaccattctacggccttggccgcatcctgcggcactcccagcccatctcggtacttaaatgccagaaggccttgtgctgtcaggttgccgctttccgctgcctgaagaagatatgggactgacttttccggagaactgtccggaaccagctttcgttcataaacaagggcagcccataacgccgccttggaatcaccgtcatccgcctctttcttccacgtctggagagattttttataataaagggctgccgttgcttcatccttcggtcctcctgctccctgggaagccattacagccacctggtactgtgccgcggcattaccgctgtcagcagcccgggtaaaccagtaccgggccctttccaggttctttgggtacaggcggctgcctgtataaaacagcttgcccaaatccagcatggaatccacatctccgttattggcccttttctctgccaaggaaacatactcggacatccatttggacgtttccgcagcattaccctccacgtcataatgcacagccagctcccgggcggcagctggatccccattcagagctctttcgcggagaccggacaagtaagcctcaaaatttccctccccggcaggctccggagaggaaatattctgagaagcaagaagtggatgctgaacgagggacagtccccacaatccggcaaaaagccaccatctgcaatgtttcttcataccggaacaagtcattcattaatggcccctgtttccgcgggaaaaactgctggaggacctgcctccaaagcccggcttacgaaacccgccttcacgcctctgaaaacctcctccgcggcggtctctctcaaaaccgccttcacggcgttggaaccctccttcacgacggttttccctgaaacctctctcctgatgacgcaaacctccttcgcggcggtctcttccaaaaccgccttcacggcgttggaatcctccttcacgacggttttccctgaaacctccctcctgatgctgaaaacctccttcgcggcggtctcttccaaaaccgccttcacggcgttggaatcctccttcacgacggttttccctgaaacctccctcctgatgacgcaaacctccttcgcggcggtctctcccaaagccgccttcacggcgttggaaccctcctttgcgtcgctcttctctgaaaccggcctcgcggcgcagggccccatccccgcggcggccgcggaagccatctccacgacgatgaaaatctccgtggcggtcacgggaacggaagctggaatctccccggaaatatccatcttccttgacttcacgttcatcctccgtctccacaaaacgagtcttcatttccggagtaggttcataagaatccccaccttcaaaatcttccggattaaacacataatcctcatcggaatcaacgcctcttccgccctgctcacccttggcgccccccccggcgacaagctgggaagcacccaggtatttacgctggcggggaggatttttcagtgacagagccacgtccgcatcatccaggaatttccagcccccgggttccaaatccccccccacagggagccgatgcgcacgcgcaccaacttgcggacgcgaaggcccaggcactggaacatttgacgcacctgacgcttcaacccctgttccagaacaatgcaggcacggcgcgcggaagcgcgacaaacatatttggccctggcatttccctccggaatgcgtactccgcgcaaaaactgcatcagtacggaattatcaaaattctgatccaccgtcacccaatattccttttcaatgccgccggtaggatgggaaagaatctgggtcaattcccccttattcgtcataatcagaagaccttcggaatcggcatccagccgtcccacgtaattcagatggcgcaggcgcggcggcagcaggtcataaacagtacctatggctccctgtgcttcgcggctgcacacatacccgcggggcttgttcaacagcaccacaacctcttccataggggtcatatggcggccgtccaccttcacgaaatccttctccgtcaccctcatcccaggcgtatcgataaccttcccattcacttccacacgtccttctccaatcagcctgtcggccacccggcgggaatcaatgccgcaggaggccaggaatttattaatgcggatacctccgttttcttcggagccatgttgttcttcactcatattggtataatgtccgctatctcagcggatgattttgtattgtttatattacggcaattcacatcctcaaaaagaggaggctttcttttgccggaagaaaaaagcctctcggttcatagacatccgagaggcttcctgtattaggaaaatgacttgccgtgcaaactctgccgggaaactctccggagaggataaagacaagcttaagcttcatgcttggtcttcggcaggccgagagggctttggcccttcttccattcgccgcgttccttcagaagcttgacacgttcaaaacgcttcaggacggaacgcttgccgcctacggtaccggttgctttgaggctggaatgcttggacatgatcttatgtttgtaaaaggttcagaaaaatacttcacaccaccctcgcggtggcaggcgggattttataacggaaggttccgaacttggcaagagaaatttggcgcaatagccaaatatatcactctatggcatcccccggatgcgattccagccacttcctccacaaatccggacggttcaggcgcgtacgctccagagacttcccgtgcttccatttttcaatggcggggtggttgccgcccagcaaaatctccggaacagccaggccccggaacacgttcggcttggtataggcgggagcctccagcaaaccgttggaaaaagattcctccacggaagaacgctcatcccccagcacgccgggaatcaggcgcgctacggcgtcaatgaccaccacggaggcaatggccccattcgtgagaatataatccccgatggacaattccatatccaccagctcttctactacacgatggtccaccccttcgtaatgaccgcagaggataatgagatggcctccggaggcagccaattccgcggccaatgactggttgaacgtacggccctgaggagtcatcagcacaacgcgggtttcccgccggcgaagttcctctacagcggcaaagataggttccggcttcagcagcatgccctgcccccctccgcaaaggtaatcgtccgttttgcggtgcttgtccgtcgtccagtcacggatattatggcagcgtatctccaacaatcccctgtcacgggcctttcccagaatgctgccgcccagaggggcttccaccatatccgggaacagggacaaaacgtcaatcgtcagcttggcggccataagaaaaaaacatcagcgttcacgcttatggccgcgcagcatggcctcaatgaacggatccaggttgccgtccatcacgtcctgaatattgccggactctacgcctgtgcgcaaatctttcaccatttgataaggctggaaaacataggaacggatctggttgccccacccgatgtctcccttctcactgtactggcggtcggcttccgcctgctttttgtcttcctcaatctggtatagcttggcgcgcagcatattcatagcctcttccttgttacgaagctggctgcgctcattctggcaggccacgatcacaccggaaggaatatgcgtgatacgcacggcggtttccaccttgttcacgttctggccgcccttgccgccggaacggtaggtatccaccttcaaatccttgtccaggatttcaatattgatggaatcagaaacttccggcgtcgcgtccaaggaagcgaaagaagtatgtctcttcccggcggaatcaaagggagaaatgcgcaccagccggtggatgccgcgttcattcttcaaatatccgtaggcatactctccatccaccttcaatgtcacggaacgaatgccggcgtcatccccgtccgtactctccaaatacgtcacggaaaatccccggcgctcacaccagcggatatacatgcgcaataacatggatgcccagtcacaggcttccgtgccgccggccccggcgtggatggttacataacaggaagcctggtcctgcggtccgttcagcagggtcagcaattcaaaatccgccagagacttctgccacctggcaaactcttccacagcctcccggcccaggtcatcgtcatccgcctcctgagccagctcaatagcagcgtcaatatcctccagacgggacttcagcgcggaaaacgcctccatcctgtgtttcaggggattcacctccgccatcagcgcccgtgcggcattctggtcatcccagaaatccggggcgctcatgcgttcatccaattcggctactcgttgttgaatgccgtccaggtcaaagatagctcccgagctcggaaagacggctatgcaggacagccgtgtcgagcgccgagagatctgcagcgatatggggatccatgcgcgggaacctatcacgaattacctggacggaaaagggcaaaatgccgtttctccaagtcatcctcttttactccgacttgcaccgggccatttccaagaataataaaactccgcacgctgaacaaaaccgctccttttccgcaggaagaacatctaacaggaaatgaatacttccggaaccaagtcctcttccccatttcaatgccccatgggaaaaacagcagacaaaaatcttatctcattcccttaccttacatcaccgttttctgcccttccccctctttccggaatgtggttcggccatccatatccccggcttcccataagagagcccggagccatgctacttggcggaattttcctctccaccctcaaaagggcggatccggcaggacctgagtttttcaatctcctcaaaagtcatgatgtgttctatctggcaagccacttcattggcgcgttcttccgggagagccaattcctcccgcaggaaatcaaacagaataccgtggctgacaataattttcccggcaattctgcggccttgaggagtcagcttgacgggagcatactgcgtatactccaccagtcccatatccgccagctgcttgacggcagatgtaacggaaggcatctttaccttaagcatctctgcaatatccctcacctgggccgtcccgttcttttcagacagcaacccgatagcttccagataatcctcattgctcttggtcagctccaacatggtataaaatgaaagttaatactttagtggaaactaactcaagattttttccagccttctttggaatgagaaaaaaccgccgcgaatatgattattcgcggcggtcaaattaatcagcgtaatacgaaaacgggcttacttctcttcagaagggctccactcttcgttttcacgggtagccaggttgaaggcgtgttccagccccaccatatcgctgctcgggcggagggcttcaaaggaagcggtttcgcggcggagctgttcggtgtcgtaattgacagccttgatggaaagaccgatacggcgttcgatgctgtccactttaatcacgcgggcagtaatttcatcgcccaccttgatcacgtctttcacgcgttccacatggtcttcgctcaactgggagatatgaatcaggccgtcaatatcgccgtccagattcacgaaggcgccgaagctggcaatcttggccacctggccagtcaccatgtcgcccaccttgaagcggtcattgatggattcccacggatcggactcaagctgcttgataccaagggagacgcgctgatcctctttcttgatttccaaaacgatggcttccacttcgtcgcccttcttgagaacttcggagggatgattgatcttgcgggtccagctcatatcggacacgtggatcatgccgtcgatgccttcttccagtcccacaaaagcgccgtagggagtaaggttgcgaacctggcccttgatgacggtaccaatcgggaaacgggattcgatatccgcccagggattgtcttccaattggcggacaccaagggaaatcttctgttctttcacagaaatggaaagaacaacggcttcgatttcctggtccagcttcaatacatcgctcggacgggtgattctcttgacccaggacaactcggaaacgtgcaccaggccttccacgcccttttccaattccacaaaggcgccgtaaggcaggagcttggtcacgcggcccttgacatgggaattgatcgggtatttgcgttcgatatccgcccaggggttatctgtcatctgcttcaggcccagggaaacgcgttccttttcgcgatccacttccagaatcacaacttccagggactgaccgatatggagcatttcgctcggatggttcacgcggccccagctcatatccgtgatatggagcaggccgtccatgccgcggaggtcgacaaaagcgccgaagtccgtgatattcttcacgataccttccaccttgtcgccttccttgacggtttcaaggaagcgttggcgctggtcggcgcgttcggcttcaatcacctcacggcgggaaaggacgatattcttacggtcgtcatttaccttgacgatcttgaattcgtaaacctttcctacatactcgttcaggtcgcgaggaggaataatatccacctgggaaccgggcaggaaagcttccacgcccacattgaccataagaccgcccttgacgacgctcttcactttacccttaaccaggccgccatcgcggtacacgcccacgatcttatcccagttctgcttatgggcggccttttccttggaaaggacgacgatgccttcgtcgttttcgaggcgttccaaaaggacttcaatttggtcccccacttcgatttcttcgtcttcaaactcggaaatggaaatagcgccttcggacttgtagccgatgtccaccaaaacgacttggggacggatttcctggatggttccggtaacaatggaaccctcacgcaattcgcggaacttgctgtcaataagttccgccagttcagttgtgctcatttaaatggttgatgagttagtattaacgatctttctcatggccccttattgaccggcgggcaatcggggcgccttcccccgccgggcgaaaaatcggttgctttcaatatcagtttcacgcaagaactcaaggcttttcttgaaaaactcctcccgattttttacgaaacccgcggagcccctctggacggcggcagaaaacgagcgcacaaaaaccttgcagcacttccgtcccatgttaaattccggctaatggggaaatgctggaatacctgcatctatcagccactcctgccgcaaaaccatgaaaaaaaacctcctttacctcctcgcagcggggctgtccggaacagccttccttcacgccgcggatatcgtcaaactggaccagccggacctggaacggggagctccgatcatgaaagccctgtctgaccgtcaatccattcggagcttttctgaaaaagcgctatcccaaaaagatttatcagacctgctctgggcggccaatggcatcaaccgtcaggaatccggcaaacgtacagccccgtccgccatgaaccgccaggacgttaaaatttatatatgcactaaaaaggcctcctacctctatgaccacaaggcccacgccatgattcccgtaaacgatggggacgtgcgcccggcggatgcccccatatgtctcattcttgtaacggatacggcggaaccctgggctgccatggacgccggcattgtctcccagaacatctccctgttctgctccgggacgggactggctacctatccgcgcgccagcatgaacaaggatgccctggcaaaggccctgaaactaacctctccccaaacacccatgctctgtcatccggtaggatataaaaaataactacttccggctacattctccggacggtccggaaaagaaaccatcagaaatggaaatgaattccacaacaggcggaattatggttccggaagaatatccatgtagatgccgggagagctcccttcaataggcatcgcgcccacagcccgggcataaaaatcagccggaccaaccccgccgatgacaccgtatgcataccccagctcccgcaaacctttcagggcggaaatcaatagcacggtgcccaatccgcttctgcgcacctcttccgccacccccatggggcccaaaaaaccgcgagccgttacatcgtaacaggcaaaaccaagaatcttcttctcccgtgtggcaatataacaggaaatgggctggcggccaaacgcgactttcgcctcacttacccacttgggagaaaaattccggccaacccagtcagctaccaaatgacgttcgtaagcacccggacggcgaatcaaaaaaccttccctctccagcctcctcaggtcttcttcaatatcgggcaaatcatacagccgcaccagcatatccatcataaccccggcaccgtatcacaactaagtgccgtggcgaataaaaaaaactggacaaacccatctttcaaccttagacttcgccgcaccacaaacaacgagctgtagcgcaggctggtagcgcgcttcgttcgggacgaagaggtcgcaggttcgaatcctgtcagctcgaccaattttcaagccgcctccgggcggctttttgattacttatttactgatataaaacaattttactcattaataactctgaacttcccctattttgcgccaaggcaaataaacagcatcatgctgattgaatttaccctcctcacaggaacaaaatcaaacgggcaaatcttctcaattaagcctggaggatgtcgggggtatttaccgatgcagaggaaaaattatctatgcccaattctcacccctgtgccaggcagcatcacagccgctgcggaagtactctataacatcccccctaaacacaggagaatgaacctcctccacaaaaaagccccgttcatatttcatgaacggggatgagtcaaatgaagtcgaatcagggagaaaaaactgggttacttgccggattccggtttaaagcgggctgcttccgattcggcggtgatttttgcaggctcgatatgcaggagctttttcatggcacggcccgggtcgctctccgtcatcggaaaatatctgacgtgatcgcccaggctgtaggaatccagtccataaatgctgtcagccggagtaaaatcttccggtgtgttcagcagtttttttacctcctttgaagacgcaaggacataactcagattacaactggaatacaattccgttttaggagagcttcccttgggaagcttattggcgtgcccattccacttgaccagagcttctacaggaatatctccccgcagcgactgaacgacgcgggcatagtgcgtcgttccctggtcagtggagactattttgtaaatgataacagacaggaccacatcgcttttttctaaatttcgggctgtacccctgagaaaactatcctgttctacttcggtctgcgtagcaacatgggaagaacggtccggctctccaagggctacggttgaaagtaaccctgaaaacagaacgcaaagaaaagaaacatacttcatatgtatatattagatactgattttttggtttatattcaataaaaatagggcgaacacaaaaaatgtccaccctatgaatatattatttaatatcagttattaatcatccagtgtcgatctttggagcagccacacggggccggaaataaaactgcccacgccaatgttatttcccggacacattcccacatgcagactatcgccaaatacgataatatctccagcctggggagtgttgtacccattttctccatcatccggataatcaggagtccccagcagggtacggagataaaccgccatttgagctgcgctgatgataatgtgctttttacccccaacgccagggaattaccttttgccccaatattattggctcccggagctccattaaggtcaataccataactactaagagcaatgctcagacgcaaggcgcaattgttaatgtaattggcatctcccgaaacgtagctatcgttcagccatcctccaatatagttccacacatcatctgtagtcatggtgggataatccactacattatagcatcccagtaaacgttgtgcattggcaatattccaaagattttttggagcatcaatttcccaaagttccagttcggaatttcccatcttgggaacaaactcctccgcattggggtaaggagcaatttcttccggtacggcaaggttctcatgatgcagtttcgcatagtggaagccctttttaagttccttgcttccagaaacggatgtggacgaatgtgagccagtcaattccgctaccttttcaccattgatttccagatagccgttgtcgtcaatctgaatcgtgaaattataggttccatcttccggaacgcggatatatccttcccagtcatgtaccccggtttcttccgtcttgtgccatccaatcttggaggactctttcttcgttaccttgtagcggcggttgtttcccacatccaacgggtggaacggttttgtagatatatagccataatgttatgtttcgtatcgtttactactgaataaactgaatattcagttcatggaaaccttgaaagatttctcgctccccatcaacacgtttaacgcgtaatccaaccctcattcggaacgtgaaggaaaaggttaaaacggcacgacaatcaagcggaaaacaaaggatttgaaaagggcacaagaaacgaaatcattgattatcaatagttatatttcaaattttcttcattcggaacgaagagaccgctggttcgaatcctgtcctttcgattattttctaacaacctcttccggacggttattttccggtaaaatcacttccctttcaaaagccagtcagaaacccactagcagctgattcttctatctgaaaaaagcccctgctgggatactttatcagtcatccgtcaaattcccattgccccgcgcatgtttctttctctaaaatgcaggtaatgagtgaatacttcctgaaacttcccggcgattcccagccgagagcctattccgaatacgaagtccgtgaatttctgggacagggcgtgatcgactccaaaacgcttacctggaaacagggcatggaaggatggcagcccgtagcccaagttcttccgccaatgtcacctatatggagggaaacacaagatcaagagagcaaagatcaaccagaggagcagcagtaccgcttgcgttatcctttaaacgggctagccaaattatccattttggcatgtttcgtattgctgcccttcatgctctggagcagctggattgttttttccaacaatgtcgttaattatgaagaaattcagacactcattcagcagaatatggttcacctgccatcttttgcggcgccattggtcttcctcctcagtatcctgttcattccatccctgcttatccagctgatctggctgtaccgggcatctgccaatattcaggaatttcaagttcagggaattcggttcactccattccttagcgttcttctaagctgtatgccggtagtcggcatggtgctcaatgccctggttcttcaggaaatatataaggcatctaaaaacccggcagaatggatgctgcaaataccctcccgttccctgcgattatatcttctggtgactacggctctaactctgtgcacccttttccctttcggggcggaacattacgtgacggcctttctgctcaccggcgcactgatgacggcagccagcatcctgtggctggtctgtgtcctgcaaatcaccagaaaacaggaggagctggtctccaaaaatcaaaactcctgttcctgatcgaaaaaaccgtaatcaacgtttttccttttcttccgaggccggctgactgcctgggaggattttatccaaagcttccatgctgttatccttatacagattctccagcagtttttcccaccccgccgccatctgaacctgtttcaaggcaataataggatcaggcatcatcatttccgggtcgggagcatattgctttagcacctcatccggattgatcctgttaaacgttgtcttcccatagcccggcattcccgcctcatgagcgatggattcaatcatctcaaaatgcaaatgcgccaaatagttgccgtgcgcagttccgactgagccgatttgctctccgcgtcccaccagagtccccagcggaatatcgctgacggttttcaaatgggcatacagactctgtacaaaacgcccgtccggcaagcggtgcagcagcacgacaacatttccccaatctgaagaaggctctcctgcataaatcagcaatccgcggccggcggcccgcacgggcagtccctcatccgtattttctcctcctattccatttaaatcctgtcctgcatgccttcccttacgggcggcattcatatcccccacaccctgggcaacataggtaaacgctccattttcatctccgaggggcgatgtaaacacatcggccagaggcgcctttgccagttcctggggtgtcaacaaaaccatccggtaatctacaggaaccggagcagaccgcggaatatcttcgtcataaatattatggggcatcccggcctccgggacggcggcatatttcgtcttgtaccaggcaaatgccgtaatcaagacacaggccgttcccaaaagccccataatgacgcgggatgtcgtcttatctatcatcgtgccgactctatacccacggaaccggatttacaatcacaagatagtcaggccagcgtctgcggaaatttttccatccacaatttgcgcgccgcacggatatcttctgaggaaacacggctggagagctcccatacgagcggaactccatgcgggaaaaaaggaagaaggcgttcaaagggaaccactcctcccagaaggggaacctgatgatcccgcgcgggccatttgacgtcgttcacatgtcctccaatcaaatgggaggacattcggcgaagaaactgctcatgatttaatataagcaaattgtgctttctttgaatatgcccgaaatcatgccagtaaccgataaagggattgtcaccaaactccttcatcaacaaattcatttcatcctcactcggcacctgctcataatggctgcgcccttcaatgcccagcttgacgccaaattgtccggcttgcggaaggagctcccggagagcttcacgcgcccgttccagataaacgggagccagacggttgcggcggcgtacaaattcgcccttggcgtcggcaaacgattccgttcccaccattccctgacgcgccaggttttgcaaatgagccgtatccatgcgtttcgccaggggttccaccgttcccatatgcaacacgatatatccggcccccagtgctgcgccctgttcaatagactttttcgtcaattcaatagccttggaacgcacctgcagcaaatccgccgtaaaaggcctgctgtcaggagaatcccccacctcgtcaatcggagcggggaaaaaattatgcaccccggccacttgcacctttccggcatctaccgccctcatgataccgggcagaagggataacttgatgccgtgggaaagttccacatggtcaaaacccaaagaaagaatctcatcaatcatttcttccccgtcctgatgacggtgggaattccagcacgtagaaaataccagcataaaaaatcaattattatgagctgatggaaccggggtccgtatagcaatcttccatccactccttgacggcggcagtcatgctcccggctacgtccgcgcgaggtttgacgaaagccggaataaaccacggaaatgcgcccaccaggtcatgaatcaccacaacatcgccatcacatgtatgggagccggaaccaatacccaatgtgggaatggaagaatgtacggtaacttgtcgggcagcatgaggcgttacgccctccacaaccacagcacaagcccccgcctctgccacagcctccacatcccttaccaaggcttcctcctccgcggaggatttccctttgatcttatatcctccctcctccagcactttctgcggcaggaggccgatatgacccactacgggaataccggcatccacaatagcacggatatttcctgcctgggctgcccccccttccagcttgacagcatccgctccagccaaaaacaatttctttgcggattgcacggcctgttccaccgtatcataagaatgtatgggcatatctcccaccagcagggcgttcttcactccgcgcgcagtagcttccacatgatgaagcatatgatccagcgtcacatgagtggtatccggaaagcccaaaaccaccatccccaaggaatcccctaccagcacaatatctacgccggcttcatccaaaaggcggcctgtaggatagtcataagcagtaaccagagtcacatgccgcctgttcttgcaggtgcggattcgttccgctttctcaaaagattgattcatggcgttcaataaacatgcaatttaccagcgttccgataccagaagcggctcagcctcatccgtatccaattccgccaacaggcaggcaaccgttttatgctggcgcggcaggataagctccggcctgatatctgaaagaggttttaaaacaaatttcctcaaatgggctctgggatgggggagaatcagacgaggaggatcattgaccaccatgtcccccacatagatgatatccacatccgccgtgcggggttcacagcgaatcccggaacgaatgcgtcccagaacccgttctataccctggcaatgcacgagcaattcctccaccgtaccgggccaggtaaattccaccacggcattcaaataatcatccgcaccatgcggacacccttgaggactggtggcatacagggaggattgcaaaaaaggatcatcagacaggctcatctgcaacaaatgatccctggcctgaaccatcaggctgtttttatccccaagattggaccccagtgcaatgcctgctctcttcatcagtaaaaaacatcgtggccgttccggaaaagaagaacggccacgatgccgaaaaagttataattgggacaaccccagaacgtcttccatggtatacagacctggttccctgccttggagccagagagccgcgcgaactgctccggaggcaaatgtcatacggctggacgccttatgggtaagttccagccgttcaccatcggaagcaaatattacagtatggtcccccaccacatcccctccccgcagggaatgcatgcctatttccttggcgggtcgaggccctaccaacccttcacggccaaaaaccacactatcttcataattcctgtcaatggcgccggacaggatttccgccagtgtccgggcagtaccggaaggagcatcaattttgtgacggtgatgcatctccattacctctatatcgcagctgcctcccagaatctgagcagccttgcgcgtcagccagaacagggcgttcacccctacggaataattggaagcgaacacaatcggaatggatgccgcagcgtccacgatctcctggcgttccagctccgtatgccccgtagtgccaatcaccagaggtttgttattggcaacagcttccgccagcagagtgctggtgaaagcgtgatgggaaaaatcaatggctacgtcgcatttggcgagggctggataaagctcctgtccctgatcatgagtagaacccacgcaagtatccggattctgcgtcaccgcctcttgaatagcctggcccatgcggcccgaaatgcctgtaacaagaatggaaatcatatcactaaaatgttaaagaatattgaaacgctgaagaagagcggaaagctgagcttccttctcttccgccaatggaaccagcggaagacgtatgccgggctgtatatctcccctcatcgccaaagccgccttgatcggaacaggattggaatccagagtcattagccctttcatcaacggataaaatgtcttctggagggaaagcatttcccccatatcctgattcaggccagctttgacaatggaattcatgatgcccggaaccagattggatgttacggaaaccaatccgctggcgccacaggccataaaaggcaccgtcaggccgtcatcgccacacagaacagtgaaattttccggaaccacctgcatcagctggttcacgcggtccacattgccgccggcctctttcacacaaacaatatgcgggcaatccttcgccagacggctgattgtttccacactgatttcaataccgcaacgccccggaatgctgtacagcataatcggcagacgggtagcgtccgcaatagccttgaaatgggcataaactccatcctgagaaggtttattgtaataggggcacacctggagcgttccgtctactcccatcttttccgcttcctgggtcatatggatagcttctgcggtggaattagcgcccgttcccgcaataacctgaatacggccagccgcgatctccacggccaattctattaccctcaagtgttcttttacagtcaaggtgggggattctcccgtggtaccgacagccacaatgccggccacgccggcagctatctgcgtttccacaagcattctaaaagcctcttcatcgacccggttgccggcaaacggagtcacaattgctgtataaagaccttgaaacttcataaccttacttggaaatatactatcttaacagacactttttgtcacgacagaatacagaaatatggcacgcctgtcaggcatcctgaaataccattcgtgaacaaatggagcaaaactccaggcaggaattaaacagggacaggaatgattccggccgcctgccgggccgccaggcagctttccttccattgaccacgatatattcccggtgaatatggcgaccttcgttcccacataaaaacaacgcagccgcacaggcggaagaagccaatcgagactgggaaacataccgaaataccggacggtgaattacgatctggctcattctgacatctctccggttcaggaaattttccaagcccgcgatatcttccacccatactcccttttttccagaacgggaaaccatattcacaatcatggccccagaaacaaaggcatgttccagcaaaacggacagacggacacgggaagaacaactcagtccctgcacctcgactgaggcatcttcacaaataatcaaataatcaacacgtccataaagagtatgtaccagaccagcaaaagaagccaaatcggaagaatggttcaggcggcctgacatgaccaggtggctgctacccgggagacaatcaacgatatggcaagattcttcaccggcctcatgaagcatggcaaccacagttccctgacaggcaaatgccttggctgccaaatatcctatattgccggcgttgcccagaatgacgaccacaggtttctgaatgacttgggatttcatatgccgccattctgacgaaagagtgtaatccgtcaataccccacacatacttaagtcattaagaaagaaaaaggaatagttaagaaaaaattatatggccacgacatcttacaagaaggaaactaactaagagaatgtagggggagaagaacgggaccgagcaagaaaagaacaggccccgcgagtcaagtgactggcggggcctgatggaaaaaaatcccggcggcgacctactcttgcgggacctgtcgtccgactaccattggcgcggcagcgtttcacttccgggttcggaacgggaccgggtgggaccactgcgctctggccaccgggcttcagggggaagaggtgattttttcttcatcctgcctgcccgggagccctgcttttttgggggcttctgagtgagggatttttttcagggtatgtgtgtggcggctaagaagatttccgtcctttgtgtggggagggattcagcgtaaactgacatctgcgtggctggtggttgatgaacatgcacaggtgaacgagacaagagcaagttgtcattcacgacggggagtgatgtaatatgatgaagtcaattggtaattagtatcgctcggctcaatacattgctgcacttacacctgcgacctatcaacgtggtggtcttccacgaacctgtagggaaaactcatcttgggaagggcttggcgcttagatgctttcagcgcttatcccgtccgcacttagctactcggccatgcacttgacagtacaaccgatgcaccagtggtgcgtcagacccggtcctctcgtactaaggtctgaacccctcaattttccaacgcccacagaggatagaggaccgaactgtctcgcgacgttctgaacccagctcgcgtgccgctttaaccggcgaacagccggacccttgggaccttctccagccccaggatgcgacgagccgacatcgaggtgccaaaccacgccgtcgatatgaactcttgggcgtgatcagcctgttatccctaaggtaccttttatccgttgagcgacggcaattccactttctaccgccggatcacttgggcctgctttcgcatctgctcgacttgttggtctcacagttaggcgggcttatgcccatgcactcgacacccggttgccaaccgggctgagcccaccttcgcgctcctccgttactctttgggaggataccgccccagtaaaactgaccggctgacacggtcctctggccggattcacggctcagggttagatcctccagtttcaaagggtggtgtctcattgatgactcggacgccccctaaagggcgtcttcagcgtctcccacttactctgagcattaaaaccgaagaaacaatgacagcttacagttaaggtctatagggtctttccgtccttctgcgggtaggcggcatcttcaccgccactacaatttcactgagcgcctggttgagacagtgcccaactcgtttcacgattcgtgcaggtcggaacttacccgacaaggaatttcgctaccttaggaccgttatagttacggccgacattcaccgggacttgggtttagagcttcgccttgcggctaaccccttgccttaatctttcggcattggtcacgtgtcacaccctatacttcgacttgcgtctttgcagagtgctgtgtttttgataaacagtcggttgggccatttctctgcggcctgcatcgctgcaggcaccccttcttccgaagttacggggctaatttgccgagttccttaaccaggtttcactcttacgccttggtatattctacccacccacctgtgtcggtttgcggtacgggtcgcttagcatacgctggggcttttcttggcactcgatccaatgatgcgctgagtccgtggactcaactcggaattcaataacctagtcatcttttctcatgcgtccccccagtttaagggttgcgagctcaggattattaacctgatgtccatcgcctacgcctctcggcctcggcttaggtcccggctaacccagggacgaaacacgttgccctggaaacctcgggtttacggcggccggggatttcacccggcttaacgttactcatgtctgcatactcacttgcatgtgctccagggtcagtcgccatcgcccttcgacgcgcatgcaacgctcttctaccactctgccttgcggcaaagtccagagcttcggtataacgcttgatcgccaatcattttcggcgcaggatcactcgatgagtaagctattacgcattttttaaatggtggctgcttctaagccaacatcctcactgtctgtgtaatcccacatcctttccactgagcgttatttaggcaccttagctgctggtctgggttgtttccctctcgacaatgaagcttatcccccactgtctcactgccacgttccattgcacggtattcggagtttgataaggtttggtaagcgggtgtgccccctagccttgtcagtgctctacccccgcgcatcagcacgtgacgctgcacctaaatgcatttcgaagagaaccagctatcacggggtttgattagcctttcactcctaccctcagctcatcagagaacttttcaacgttcacctgttcggtcctccacatggttttacccatgcttcaacctggccaagggtaggtcacctccgcttcgggtccagtacctgcgacttattgcgccctgttcggacttgctttcgctgcgactccgggccggaagcccttagtcttgccacaaacactgactcgcagactcattaaacaaaaggcacgccatcgcagattgctctgctctgacactttgtagacatacggtttcaggttctatttcactccgctcacagcggttcttttcacctttccctcgcggtacttgttcactatcggtcgccaactagtatttagccttgcgcggtggtccgcgcgggttcatacatcgttccacgtgtgatgtattactcaggataccactaattcccactctggatttcgtctacagggctttcaccttctccggccagcctttccaggctgttctactatccagtatggtcgaatatgacgtggtcctacaaccccgaaggaataccttcggtttgggctccatccgctttcgctcgccactacttacggaatcgatttctctttcttttcctccgcttactgagatgtttcacttcagcgggtttcgcgtttcataccctatgtattcaggtatgaacgatcgagtattgcctcgatcaggttaccccattcggatatccccggatcatcgcttgcttgcagcttcccgaggcttttcgcagcttgccgcgtccttcttcgcctgttggcaccaaggcattcaccgtacgcccttacttacttcatcatattgcaaaagctgttaccacttccacaataccacaaagccctttcgtgacttactgtattgtctcattgcttggtatgcatgtttatcttgtgttttgtagttgttgttcaactacccactttgttggaaagcgattgcttctcagcaatcgttttctttgccacgcagatgtcaattttcgctttccctcaataatcgattttgctggtgggcctgacaggacttgaacctgtgaccccgcgcttatcaagcgcgtgctctaaccaactgagctacaggcccggctttgggtctctttcccgaaactggtggaggcacggggactcgaaccccggacatccagcttgcaaagctggcgctctaccaactgagctatacccccagttgcggttctcggtgaaaaaaggtcgtcacgcacgtcgtgccaggttgcgctccaggcgtctggctgtttacacatctttggttcgttgcgggccctcgcgggttccgctttctctcccctcgggaagagatccgacctgtgcacttccgtgcacttgctccatagaaaggaggtgatccagccgcaggttcccctacggctaccttgttacgacttcatcccagttaccagtctcaccttaggaccctgcctccttgcggttggcttcagatacttcgggtgcgaccggcttccatgatgtgacgggcggtgtgtacaagacccgggaacgtattcacggcgccgtagctgatgcgccattactagcgattccggcttcgtgtaggcgggttgcagcctacagtccgaactgggcccagttttcaggatttcctccgcctcgcggcttcggccccctctgtactgggcattgtagtacgtgtgcagccctgggcataagggccatactgacctgacgtcgtccccaccttcctcccagttgatctgggcagtctcgccagagtccccaccttcacgtgctggtaactggcaacaggggttgcgctcgttgctggacttaaccaaacatctcacgacacgagctgacgacggccatgcagcacctgtgtaacgcctccgaagagtcgcatgctttcacatgttgttcattacatgtcaagcccaggtaaggttcttcgcgttgcatcgaattaagccacatactccaccgcttgtgcgggtccccgtcaatttctttgagttttaatcttgcgaccgtactccccaggcggcacgcttaacgcgttagctccggcacgcagggggtcgattccccgcacaccaagcgtgcaccgtttactgccaggactacaggggtatctaatccctttcgctcccctggccttcgtgcctcagcgtcagttaatgtccaggaacccgccttcgccacgagtgttcctctcgatatctacgcatttcactgctacaccgagaattccggttccccctccattactctagtctcgcagtatcatgtgccgtccgcgggttgagcccgcgcctttcacacacgacttacgaaacagcctacgcacgctttacgcccagtgattccgaacaacgcttgagacctctgtattaccgcggctgctggcacagagttagccgtctcttcctcttgtggtactatctttttaatttgctcccacatgacaggggtttacaatccgaagaccttcattcccccacgcggcgtcgcaccatcagggtttcccccattgtgaatgattctcgactgctgccacccgtaggtgtctggaccgtgtctcagttccagtgtggccggacatcctctcagaccggctacccgtcatcgccttggtgagccgttacctcaccaactaactaataggccgcgagcccatccccaagcgcattgctgctttaatctttcgatactatgcggtattaatcccagtttcccagggctatcccgctctcgggggcaggttactcacgtgttactcacccgtgcgccactagagaattattagcaagctagcaattctctcgttcgacttgcatgtcttatccacgccgccagcgttcgttctgagccagaatcaaactctccatcaaattaatttttgaaattgctggaccaaatggaatcttgcgatttcatttgcgccatgcttcagccagctcttccttcaagttgtgtctcttgaagacctcttcgctctgcctcgcacggcgcgcgtcacgaccttttttctttccccttgcttctaccaaaccacccctctcagagctaggtcgctccttcgggctttttgctcctccggcgcctctcgacgccctcggaaaaccctcggcggttttcggtagtcattcccttcaaatcttcttatcgcccctgcttccagggaactctccgggtggccggccccagccgcttccgttactcttccgagtccgtccgccgccgggcttttcatcccgtcgccgtgttggcgtgccgagaaatctaccataccacacctttttgtcaatttttttcgagatgttttttgcgatttgttgagatcaaaatcaaaaaaatatctgattatcaacgtattgcatttttatttttttctaataaaaaagcctctttcaccacgaaagaggcctaaacgtttcagaagtcctaagtttctctctactttttgcctcctccactctttttcttcatgactgcgtattgatgaaccagaggcagttctcggagggcgtttgcagcatccttccttgcctggtcataatcttttttctccattgccatattcatcatcacttcatagcaggcggcattgtatccgccatcatccctcgtattagaatccctcataatctggagagcgcgccgagccgccttatagctgtatttacgcatttcctccgagccgttaaggattttcaggatataggaagcaagcgaatcttcccgggggaaacactccaagacgtggtcaaagatatcaaccattttccgataatttttctccttccaagccttttccgcccgcacttccgccacagtagacgcaaaccatccgttatcggaaaactgccctgcattttcctcaatcaacttctggtattcatcaaatttcttttcccgcctcaattcaaaggatttttttatgacagcatacatggcctgctggcgggccttccgtttcgcatcttcttccgcaaacctgtttttgtcaaaagagtccaatctggcagtttccgccacccattcgggcatcttcttaatttctccagcccacagcaatgttccgtcacgaacgacgaccgcggcgggaaatgagtcaagtttgagcaaatcacaaaattcaatgaccgaacgatccgatggaataccgacaggataaggagtccatccttccggcccggataaatagtcccgcatctgtttttccgccgacggattgagtcccaataccacggcttttactcccggatggtctaaaagcccgtgttttttaagaacggcatcaagagctcttccaggagctgtttctccaagtatattattgtggcctctccagaagctgatgaatacggttttgccgacaggaagtcctgttagaccgggatgattgaaccattttaatttgctgaacaggggagtgtactgtttgtcttcctgcactactcccatttcctgcatcttcctcggaggttccggttttatttcagcaaccgcctgatttacaagattctgaaaggattccttattgcctgaaagctgctgcaacttcgtccaggctttgctgatggacgttaaggaaagcgccttttccatatcctgcaacgcttcttccatatttccctgccgttccctaagttccgccatcagtttccatggcaaggaagcttccttgttattccttctggagatttcaatacaacggttcagacatctttccaccagggcggcatccatttttccggcaggcacggattttccatttagaagcgttcccgccacatcaatctgtacacggtaattgtccggatactctttgcacaggtcatccagtacggcctgtgcttcctggaatttttccaattccgccaagactctgaatggaaccattttcagttgaatgatctgatcctgctgaaactgtcccgaatcctgaatttgccttaaaaaggcctgagcttccccctttcctcccttccgggcaagctctcccgttctctcagaaacctggcggtagagcttccatgcacgggcgtttgcgccgggattatcccccggaagagatgctgcagaaaaatcaggcttcaacatggcccgcatcatttcttcagaaagttttccaggatgccctctccaaataagcttgccgtttttaacggcaaaagcatgggggatgccgttaacccccattggagacagccatttatccctggtttttttcccatccacatccacggccatggcataagtaaggggcgatggacggtttcttaaaaattctttcagagattccggagatttcctgtccatgacgttaactccgataacctgcatatgaggattattcttaaatgcctgatgcaattgttccatatggggcatagcagccaggcacgggccacaccaggtagcccaaaattcaaaaatgtacactttgtccttttcccattcctttaccggagttccctgtatccatacatccggcaaaccatccagagcaagtgatggaagggcatcctccgaagcaaccgttttgttttcctttttctcagaagaagctgcgtgcaatggcattccggcagacaccgcaaagatcatggaacaccctaaaaccaacagagaggaatttaacatggtaacacggtactatcgtaaccttctgtgtcaagccaatagaaaaaggaaaggaaagatagaagagccgttatcgtgttcttttcaccagaacgaaatacaaaatattcccaaaaataaaaaatattaatcatgaagtttttcatatggaataagaaaacaaacacgctcagcatccacacttttttgagtttcattggatttaggaaaaatgatttacctttttggatatacaaagacaatattattttctaaaatagaaaatatgccagaaatggcttgccagatttttctgaatgcgaaaaatgcgctcatggatgaaatgaagtccagtatcagaaagtttctcgctcttacgaaaatgacccgggacgaatttgccgacctttgcggcgtcagcaaaagtcaggtcgataaatggctttccactgttccaattccccgtgccagacaacgccttatcatcagaatcatgaaggaagagtacgccaaacaggcacgcctggctcaaacaaaaaatccgaacagcatccacgttcccgttactcctcaaaagtatgaaaagttcaggaatgaagctgaacgccatggcctgaccgttccggaatgggcgagtgaagcactggatgctctttccagcatcaaaagcagaagctgaaaagaggatccgatattccggatcgattccagagaaagagaaaatagtgttgttatcgcctcttccctatcttttctttcattaaaaatctgcacaaattcatgtctgacgacgatatacgcattttggtgaaggagtggctacaaagccaaaaccgcaagtcctatcaattggcggaggagataggcatccggccgcaaactttttacgcacagatgagcgttcgtaaaatatcggccaataccaaaaaagcgctttcccgcatcattccaggcctggtttccgattcagatctgaatccaccttccaatacggaagaatgtgacccgaaaaaactcagaatcaaggaatggctccgggctcacggcaaaacacgccgatggcttgcggaacaatgccgcgtttccgtccgcaccgtacatacctggtttactgcacgcggtaacattcctgtcacccaatatctctttatcgataagctgatgagtgaaggcgagtcgtggaaagttcagcttcccaataccattcccgtgaattttccggaaacggaaatggaaattgttcacaaattccagaaactacatccggacatagatcttcctatgtacggcatgcataaaatcctggagttatgcgttaatgtactcactcaggatgaatattcaaagacgtctccatactcccgtattaccaataccggagagattcgccaccgccggataaaataagaattattcaaaagttcaaattttcttttccacgggagcatttctgaaaatgcactgtttgcatacccctgccggtatttttctaaaacatcgcaggttctccgccagcctggccttccgggccattcttcttaatctttcacggaaccctttcatttttttgtctccttttatcacgacggccacagactatcctatctctcaacacagagaaaaaatcttcagccacattacatcatcccttcagtttcgaaaatcaatcactattgattggaaaaacagtccgaaccatgcgtaatagtgcttctatgcagcctgttcaccagagttaaccatacttaccttgcctctccatttttaagaaagccggcttttggtgaaaaagctcttatcgcatgaaaaaccccgtattcttaaaaagaatacggggttaaaaaatggcacgtccaactggattcgaaccagtgacccactgcttagaaggcagttgctctatccaactgagctatggacgcatgatgcggcaaaatagtaacagagttcatctcaacttggcaagcccggatctttgaaaagcgcgctttaagcgccggagcagcggtcatgcgtaaaaggtatgtccaccagggtcgctccaaacttccgcaccagaggctcctgacaggaaaacatgcgttcccgttcctccggttccgtatctatatatccgtgcagatgcagaagaccatgcaccatgtaccggaaaagttctctgaaaacaggttctccgaattccgaagcctgccggatagcggtatcaaagctgacgatgatctctcctattccgtctccatgcggaaaagtaatgacatccgtcgccgtcggatcattcaaaaaacgggcatgcacatcccggatgacgtcatcggaaaccacgctgatttctacttcatccaatccggaaagtacggggacaggaccttcaggcaacgccaacacggacggaagacaactctccaaggctccaattagggcatccgtaacggatgaactgagcctcccctcccccaaatgattgtagagttcaagattcggtttcattttcctccgcatccgctccattcttcatctccgcttccgtggattttccctcttgaagggttccggcatcgggcaactccatgatttcaggaacggctttgccttcaccttcctttttcaccgctttctcttctttttccctgacggacacatcagagaaagcatttttctcaatttttgcctccggattgtgagaaggataggcaatgcggttgtggtggatgcttttcagcgtcttaatgaaactgttgcgaatctttttgagatctccgaaggtaaggccgcaatcgtccaaatggccgtccaccacccgttgcttcaaaagttcatccacccttttctgcatttcctcacaggaaattttacccatggagcgcgtggcgctttccacgatgtccgccaggctgacgattcccgtttccttgctctgcggattgggccccttgtaacggaagttggattccaccacctccggaacgtcatccggagacgctaggccgctttccacgcggctcagaatctcatcacggtattgaagggctttccggtaaaagaagtaagccagtgacgtgccgtgatgctgctctataacgtccaccaaaggacgcggaaggttgttctccctggccaatgccaccccgtcctgaacgtggtcgatgatgatacgggcgctcatgctgggcgtcagctcatcatggggattggggccatccatgatattttcaatgaaataaagggggttttgcatcttgccaatgtcatggtagtaggcctccacccggcattcaatgggattggccccaatggcttccgccgcagcttccgccagctgggcaaccatcaggcaatggtgaaaggttcccggagcttccatttgcagccttttcatgagagggagattcatatccgccatttccagccaggaaatgggcgtaatgattttaaaagctccttctatgataggcaggacaccgctgatcagcacgctggtcagcatgcttacgccaaaagccacggccaggcaaaccagaactgcagtaaggttgtagtcccatgcctggagattgatgacacccatgatgcaacacagcaccatgacaagcagccccacaaagaagcccgctcgcagcaactgagcacgattccgcaggttatgggtaagcaacacggtaagcatgccggagagagagctcagaatccagaattggacctgcttttccggagtatattgctccggcagaatgaaaaatccgccaagcatgcagatggaaatagtggcaaacatgcccagaagaggtcccagcagcaccgtgacaaccaacggagccatcatatagggaaggtacaaaagttcattgcctatgtcggaagtaatgtcagccgttacatgccggatgagaccaaaaaacaggagctggaccagaaccgccccccacgtgacgacaaaggttttgtttttcctgcgcaaggaaccggcgcataaccagtacataggcatcagcgccagcgtcacggaaaaaagcagaaaagcttccgacacatgatgccatatggattttccccagtggagactgtaactgcccatccattgaagcacgatgaaaaccagcacgcacaacccgacggataccgccaggctggaatccaaacggtcaccggctgaacgggacacggaggcagccccttccggggaggcactttcttttgccgctgcggcggcatgctttttcagaaaatgaaacatgataattatttggggtacacttcggcaacctccggaatagtgcccagccgggccatctcctcttctatgagggggttgacgccctgttgcaccatttccatggaaactctcagggcattgcgaatggctacaggggtagaactgccatgcgcaatgatggtcacgcccctgacgcccagaagagggcttccccctacggagtccgcagaaaggcgcactttcatggcacggaatgctccggaggcgcaggcagctccaaccatacggaacgggtttgccttaagttcctctttcagccatttgctgaaagccttggcggtagcctcgcatgttttcaacaggacgtttccggtaaaaccgtctgtcagagccacatctatttcatgttcaaaaagatcgtggccttccacatttcctacgaatttaaaagggagcgcaccgcgctcctccaaatgcttcaacagacaaaaagttcccttggtaaaatctgttcccttttcatcttcagagccattgctcataactcccaccttaggcatctgtttgccgtaaacagaacgcgccagaatgctggccataacggcataccctaccaaatgccggggcttggcatccgggttggctccggtatcagtcacattgcagactccgaattcattcggaagctgggtcacaatgcccgcacgttccacaccatccagcaacctcagtttgacggtggcagccgctacagccgcccccgtattgcccgcgctgaccacggcatccgcatctccggacttgaccagatccacggaaatggacatggatgaattttttttctttctcaccgccagcaatccggattcattcatttccacaacttccgcagccggaacgatctccacgcgcgggccggaaagcccccagcggtcacaagagctgcgcaccgtttcttcccttcccacaagataaattttttcaatgagaggaaaatcctgcagggcccgcttcgccccgtccacgttaatatcgggcgcgttgtcgccgcccatcacatccagtgcaatcttcatattatctgttgaagaaatgtgttagcagaaaaaacagtccgcttcaagcaagttcagccgctttgcgaagcaaaagcggctggaaagtctatatgatagcgccgcaatacggcgataattttcaaggcaaatgcggcgcccgcggaacttacgcttccgctttcaccacaatttccttgccggaacgggtcgtgtacgtaccgcaattggggcaggcggtatggccgggggtgctgctgccgcaattctggcacttgcggagcttcggcgcgcgccatgcctgagcggcaaggcgggtacgctgcttcatcttggacgttctgcgcttaggtgctgccataattttagttggtaaaaaggtgattaatgatgatctcccagttcattgagggcgtcccacacgccgctattcctgatcggggcagaactgtttacacccgttcccccctctttgtccactccaaaatacggagttttcgccatacagtcgttttccatgcctccgtcagcacacttcgggtatgccggaaaatccagaactatttcttccctcaaggaatctgaaacatccacaacattctgtgaatcaatctggaaagaagtcgcgaaatcacaaacttccaccacgtagtcaaagtagcccaggcaacgcacacagcggaatttaaagggggcggaaatattgcctcttacaaacaattcattttcaaatctctgcacatgcagatcaaaagcaagaggcccaatggaagtaacctcttcatcatcaatgccgaaaatttcagaatccagttcaccgctgtattttttccctgcctccggcaagttctccagttctaccagcaatcttttcatgagtatatcttacaggcatacttaatgcctgacaagcaggcagggcggcaccattcatggaaaatgacacatccgtccctctttcaggcaatgcccgaattcgctccggcctaaccgggaggccattccagcttgcggcctgccaacagatgcatgtgcaaatgggggacagcttccccggcgtcatgcccattgttgatgaccaggcgaaagccaccttcatccagatgaagagtcctggcaatccgcccgactgccagcatcatgtgtcccagaagggcggcatcttcctccccggcctcggaaaggcggggaatgggcttgcgcggaacaagcagcaaatgttccggtgcttgtggactaatgtcccggaagcaaacacacaggtcatcctgatatacgatgtccgcggggatttcccctgaacagattttttcaaataacgtagcggccataaaatcaaaaaggaatctgcaatgactttaacatgttttgcaaaccgtgggcaagttattccctgacggctgaagcgcgtcgcaggcgatccataatagcgcggcccaggccggattccggaacggattccgccacaatgatgtcaatagcttcattttcatccatctgtctcatcagggcaaacaggcgcacggcagcttctgccagccgcccgctgccgggactcatggctaccacttccgcccagtccccttcccgggcaagagcggacgttccttcataggaaagcaagccgtacttcaccccctccaccggggcaaaattttcccccggttccagcagcagcataggtttgcgcggggcgtaatggctggtgagctgccccggcgcatccgccggagattcttccgaaacaggacggcaggaaggcttgcggcgcaccaccttgaccaggttgcgaaattgttcccgggtcaccggcccctcacgcagcaattccagagagggcttgcccttctcgtcaagcacagggcgcacaatcgtgctttccagcccctcggaacaggctccggcatccagaatcatttcaatactgccccccaattccttctgtacggcagaggcggaagtagggctgatatggccgaagcggttggcgctgggcgcagctataggacgccccagcgctttcgccaccccccgcatggcaggatgagcgcttacgcgaacggccaccgtaggaaggccgctggttacaatatccggaatgatatccgcctttggcaacaccaaggtcagcggccccggccagaatctggaggcaagcgtatgcaccagatctttcagcccctccggaacggcggtatatttttccacctcactcccatgatgcacatgaataatcagcggatcaaaagaaggccttcccttggcttcaaaaatccttgctaccgcttccgggttcaaggcatccgcccccaggccgtatacagtctccgtgggaatccctaccagcgcgcccgcacccagagcttccgccgcacgggcatacagtttgcggttgtctgacaggggatctacctcgaacaattcggtttgcatggctttatccttgcctgaagaagctcctgcgtcaagcaagacctccttcccctgaaaggagaaaacagacaaatgaataagagcacgtcctgcggcctcatacttcccctctctttttccaactgcctttacttcactccacccttacggacttccccgagtgaaagctggcgcaggaaaaggccattccgctaaaaagttgttttctcacgctaccggattgagtacaatcaagccatgaatagggccgcatcaacatccttgccaaacatcatcctgatcgggctgatgggatgcggcaaaactaccatcggaaaggaactgcaccgggaaacgaaccttggttttacggatacggaccagttaattgaacgccagacgggaatgcacattccgcagattttcaaaattcatggggaatcacattttcgagacctggaaaccggaatcctgcaacagcttcagatggccgccacacaaagccgcattatttccacaggaggaggcatcattatcagaccggaaaaccggctgctactgaaaaaactgggcttcgtcgtctggctccatacagacgtaaacatcctgtaccagcgtatttccagatgcaccaaccgccccctgctccaacaacccaatcccaaggccgtgctggaacatctcatgaatgaacggcatggtttttaccaggaaacggcgcacttgaccattgatacggccaatctccacatccatgaaatcgcattcggcattctggaatccgccagagtattccggtcccgacggcaataatgccgacccgtttttccgtgagcgggaaatttttctctttctgattcatcctaacgcaagcgcttccggggaagccctttttcccgctccacgcacaagaaacaacaaaaggcgatccccattaaaggaacgccttcaggaaaataataatgaccggaaaaggcttaagccttacgggccttacggatcattgaattcaccgtttcagagggctgtgctccgttggcaagccatttgtcaaccttttccagattgatggtatagttgacaccttccttcatggggtcataggagcccacttgctcaatgtaacggccgtcacgacgcgcgcggctgtcgacaacgacgattttgtagtaaggacggtccttggaaccctgacggttgagtctgattgctactgccatatcaattataaataaaaggtgttaatggaaaacttgcgcgccttgccactcacatgcgtgcgcgttcggctttccacagcgggtgcagatgtatgcgatataatggagtcattgtcaataccagagttatttttacaggaaaaaagcctctcctccatttctgcatcaggaaaaattttccaccgccatgcggccaaaagaatacagcatgctgaatccgaaccccgccagcacaagggacaatattccatccagtattccggcataccgtccgtaaaaggaacgaatgggctgccagcggaaaacaagagcccacaaaatccagcccgccgttcccgtcgccacgattaaaaaacagataaaaagagcataggaaggatcatgatttttttccaacagcggagcggaaagagccacaaagaaaaacgtggccttgggattcatcaggttagtcaccagagcatcacggtaaatacaggaagccggggaaatatccccgcacccggcaaggaaagcattcctccccctcggccatattttctatgccaaatacagcatccagcaggaagcggcgcaaaacagccccacccccaggaaactgtgaaaaacggatgctcctactgtacaagccagtgcagcatgggcaactattccggtaccaatgcccaaagcagccatcactcccgcgccaaagccgtaagccagcgtgctccgggtaacaaaagcctggtcgggccccggagatgcctgggaaagaagcagaatacctgcgaacataagttcttccttcatgaaacaaaaaacccttatgccctgggatgcgcctgtctgtaaacttccgccattctggcacgcgtcacatgcgtgtaaatctgggtagtggataaggaagcatggcccagcagttcctggacggaacggagatccgcccctgcctccagaatgtgcgtggcgaatgtatgcctgatcttatggggagaaatggtaaaaggaatggaagacagcttcacatatttgttcagcatcatctgcacggagcgagcgcttaaccgggttcctatacgggagacaaacaagggggaattcttcggcagacaggccatggaaacataagtttccagagcagccagagcaggagttcccacaggcaggatgcgctccttgcgccccttccccattaccttcacgccccggaaacggtggtccacactgccgacatccagccctactaattcactcaggcgcatcccgcaggaataaaaaagttccaatatggcggcatcacggtagggaagccatgcgggagcattggcggaaacggccgtcttgtagggaagctccaacaattccaacatctggttgagtgtcaagaaaacgggaagcgttttttttcttctgggaagggaaacgcccgtcatcggattcgtctccagcccgtgcctccgcatcatgaaacggtaaaaactgcgcagggcggcaaacctcagccggatggaagacgtggcggcttcatccttcagctcctggaaaagccagtccctcatctggtccggcgtacaattctcccaccctgggaatgaatcagccgcccaggccctgaactggcgcaaggcgcgggcgtacacctccaccgtatgaggagaagcctgcttttccacctccagatattgaagaaagtcctgttccggttccagaggaatccccatcatgaagaataaattactccgtacctttatccttgtcatccccggcatccaccggcgactccttcagcagcacttcactaatattggcccggatgaacaaatcaatatcgtccggttcttccatggcatacaaagggctgtctttatggctgtccgccagagcctgctctctctccaccgggctgagcacaccgtcctggtccaaatcgtaaagctccatcatttccttcattttggcctggtacagagccgcggcatctttcatgacaacggcatgttcctccggatcaatgcggccgttcccgttggcatcataattctgcagcaacatgttacgagtcagcagaaacaatccaggagcaaccatgaagcgcttccgtcccaccgtgcgaatttccaccatgggcatttccaccccctctgccggagggggcggcggaggaatttccttcctctcggcgggagggtaaaacggaattccatctctcttgtccggcccggcatccggcctgcgcaccccgcgccgtttctctacatgttcccggaaagccctgtactcttccagggaaagccttccgtccccatccttatcaaacttcctcaggaaggtttttctggcctccctccgcgcagagcgggcatcctccaccaaccgggccttgtcctgttcggacaaaattcccgtgcccgtactgtcatagcggtccaaaaccatttggcggatgagcaaagtcacctgaaggcattccagtccgggcctgggggcagtttccattttcccgcggtcgccggaagccacggattgccctgccgcaaacgggaacagaccgaacgccagcgctgcggaacatgacaagataaacatgtggggcaatctcataaccacttttactaaccccgccggaaaaagacggtttcaaaaataaacatccgcccctgccggcgggcgacacgggcggatgcaggaaacgtacggaaagcggaaaaacttacttctccacttgaacgatcgcgttcttttccaattcaatcaccacgccttccgcaatcttgagagaaacggtgcgctcattcaccttctccacaaaaccgtgcagccctgcgtttgtaatcaccttgtccccgcgctgcagggctgcgatgcgcgcctgctgctccttctgcgccttcctctggggacggatcagcatcacccagaacaggacgatgataatcacaaacatgaacatggggctggcgagaatctgctgaaacatatttgcgggttcctgcccggcggcgcccgccgcatcctgagcctgtgctaacataaagatattcataaaatgtcgtttgctttataccgcgcgataaacgaatccttgaaggaaccgaacgtgccggcggctatggcctcgcgcgcctgggccatcagccggagatagaattccagattctgaaaagaaagcaatcttaaagcgagtatttcaccggctttaaacaaatgccgcacgtaagcgcgggaaaattgcgtgacatgcggatgtccctccgggtcaattgggcgggaatccgtcgcccagcgctgattcttgatatgcatggggccgtccggagtcagcgccacgccgtggcgagccaggcgggtaggcattacgcagtcaaacatatccacgccgcgggcaatcatttccagcaattgggggggggtgcccagccccatggcgtaccggggcttctcctccggcagccagggagcggaatgatcaatggcgcggagcatttcatcctccggctctcccacggaaacgccgccgatggcgtacccgtcaaaatccatggcggccagttcttccgcgcacttctttcttaaatccgcatacacggaaccctgcacaataccgaaatggtgctgacgcccttccccggaacgggggcgatgttcctgcacccacgccttgcagcggcgggcccaacgaagcgtgtaccccagggaggcttccgcgtacttcctgtcgcagggataaggggggcactcgtcaaacagcatggcgatatcactgcccaagtccgcctggatcttcatggaccgctccgggctcagcatcatgtacgccccgtccaaatggttctggaaacgcaccccttcttccgtaattttacggagcttggcaagggaccagacctggaacccgccggaatccgtcaaaatagggcggttccaggaggaaaatttgtgtaatccgcccatttgcctaattaaagcggaaccggggcgcagggacaaatgataggtatttcccagaataatctcagctcccagcatctccaaatcctgcggatgcatggttttcacggaaccctgcgttcccaccggcatgaaaatgggggtgggaacccgtccatgcggcaactcaagcgaccccaggcgcgcagccgtggaggaatctttctgatgaagtataaaaggcatcggaatcagactttctgcaatttgataaagcgggcgcggtaaatcggctttcccatggcctcccattgaagctggaaatccgtacggggataaaaaaattcgtcctcatcccaactggcacggctaaacagaccgctgcgcgccacatggtccagcacccacagaaaatatccttcatgatccgtcttgaacaggaactccccgccatcggacagggaacggtgaagcacgggaagaaaatcctcctgcaccagccggttcttatgatgcctctccttgggccaaggatccggacataaataatgcagccgggaaatgcagccgggctgcatcatccattccagaaagtaacggctttccacgcgaaacaccttcacgttatccaacccgcggacggccgcccgggaacaaaccccccgtacgcggcccaaaagccgttctattcccagaaaacggcgctccggataatgggccgccatctgaagcaggaatcctccgtccccacaccccaaatcaacctcaaacggaccatccgcgccaaaaatatcagaaggcgccagcaccttgaaaaaatcgtctggaataaaggccggatttatcatgggaatcaacgtgcggataagatgcgttacaaaacggactctgtcaaacgagaagaccctctccccgcaagcatggcgggaagaggcccgaaaaaacggaaaaaataagccagaacggcccggaaccgtcagctccggcaataaaggcgattataaattttacggtcaaaacggtaatagcgcgcggcgcggtggggaaccccctcctccttctcatccagcggcacaatgtaggggcgggaagcgatctttttgtggaaattacgcacatccatgggcttgccgagaatctcctcattcagccgccggagctgaagagccgtaaacttggcaggcagcatgtcataaatcagcgcaggctccttcttcacggaagaacgcactctctccagcgccaggtcaataatatcccggtgatcaaacgccagttccggcaaatcatctacaggaacccagcgggtcttgtggctttccatcagtttgcgcagcttggtggaaatcctgagcatggccatgtaggccaccgtcaccaggcgtcctatcttctggccggaaacagcctccacccatgccctgtcctccggattcttgatgcgcgatggcgcaccgaaagtatggaactgttccaaatggggggaagacatgccggtcatgtcaaacaaaacgcggcgggcagcggcatccagttcttcctcctcataaatcaaatcgccgggcaatttggaaatggcgccggtatggccaggttcaaattgcgtcttctcaaccagaaggactttcaaaccttcttcatcgaacccgatcaacacacaatccactgagagatgcggataaaatgcctgcctgctcattatgttatctattattgtagtaagttcccagaatcgcatcaacgctacgcaagcgaaccagccaagtcaaccaaaatcaaaatagaaacggcaatgaaaagccggcccgcttggcaccgggaaacatcacgccacttccggaagactgcttctcacgggcggaaaaacgcgcccgcgtcttgcatttcatcatcaccccgtccatataataaaatcatgcagacaggtatcctcaggggaatgtccgtgctggccgggctgctatggctggcatcctgctcgtcctctcccaaaagtcgggattatccgggctacatgacccgcccctataccatccgggggcatcgctaccatcccatgaacgtggaacaggcgctggcgtatgaacaaacgggaattgcctcccattacaatgaatgcgccctttgggggctcgtcagcggaaaaacggcgatcggagaaaacgtgcgcccctggcatctgcacgcagcgcatcccacccttcccctcccgtgcgaagtgctcgttcaatcccttcgaacaggcaaaaccgtaaaagtccgtgtaaacgaccggggccctttcatcaaaaacagaatcatagatcttagtgaagaagccgcagaacggctggacatgaagcaccatgggctggacaaagtcagaatcaccgtcctttccgtaggagacgggaaatggaaaaaagaagcgcccccttgcgccactccggcctgattccctacttcaacacattccgtgtggtcttaaaatgcatcttggccaccttgggcagcatttcttccccatgcagggccaccagctggcgcgcagctttcaccacttggccggaagctcccagcggcaacttcatgccggcgccctctcccgccgcatccatccagttcacaaaacgttcgcgcgccagaatagatgccgcagccacagcaacatcactctccgcccggacacgctgttccagccggacacacacctttttggcggcaagcgccctcttcagaacaaacggattggcgaactggtcgctcaatgccatgggacaatccggcaccttggccgccagcccctcaatcaccgtagcatgcccccaggcgagaaaacggttcaaattcccgaactccggataaagctggttataccgttccgggccaatgcttaccagatgaaaccggatgcccggcaccctgcggatcccctccgccaggcaacgaattctggatgaagaccctaccagcttgctgtcacaaacgcccagcttgcgcaatgcggcgccgatgcccccgtccacataaacgccggccaccaccagcgggccgaagtaatctccctttccgctctcgtcaatcccgaagtggggaacaaaaccgcatccttcttccatctcttccggctgggccaaaactccggtcacctgcggttccagcgtaaactctataaaatcatccgttccctttccttgcagaagaagcttgttcttcttctcgtaaaccgtcgccagcagggaaggcccggcaaatgaaaaacgcgcatagggaacctctcttctttcaaaccccttttcctcaagaatggactcaagccttccggcctgggcgtcagtcagcatggttgtaaacgtggttcgcatatatccttcccggagccggaacactccggcggcaagcaatggaagcatcccaaccattccggtcaagcaaaattcccgcatcacgcggttgaggacgtaaaaatcaagcatgccacggattatgtgattttttaggagacaaatcatgcacgctgaactataaaactcatacattcatatcattctgcactccatatggctaaaacattaacaaaacgagacctcgttaacaaaatcagcgccgaaaccaacttcactcagattgaagtgttcgacatcgtacagcgtgccgtggacattatctccagcacccttgctgaaggcgaccgtgtggtgattcgcaatttcggaaccttccaggtgaaggaagtgaagcccaaagtaggccgcaaccccaaaaatcccgaccaggatgtgccgattccggcccgctccgttgtcaaattcaaggttggcaaggaattgaaggatcaggtcgccaagctgaccgcctccaagtaatccccacagggatcagacagattactccgggcgcctccatcaagcaatggaggcgtctttttgtttgcaatttgcgcggcattcgggaatataagggaacgtgagcatgttccggatacagcaccttcttctgatcaccgtagcagcactttgctcctgtgctacagaacgcacggtagctacaaactttcagccccggcaacgccctgattcggaaaaaacggacgcagagctgatggatgccctggaagcgaaattcgccggcggcttcggccagcagacggacaaggaaggaaacaccaggatggtgtcccaaaaacggagttcctttgaagggctccggtacagcggcaacacgtctcaaatcgaaaaaaaggcttttgaaaccgcatcctttgaaaaaaagaaatttgacggtgcctccacccggtttgaaacgaagaaatgggacggcatcaaatccttcacggatgataaactggaaacaccggacttcatcgcccacgccaggggagtaaatacccactcctggcaggatgcctccaaacaatacgccacgcagcaatccgactttcatggacgctcctggaaagatgcggacaagcgcctcggccacactgtcaaccgggacattgaagccaagagacaaagctttggacagccaactatcatgagtgcgcggcaggcccaggcgcatactattcaggaaacgcgggaaatgatgggacgcacggactgatgcgccgatgtttcggacgtgatcccatgccacatttcagattcgacattgttttcagccgccatctataattctgcccgtgagtgccaaagacgttcctccttccatcaccctgcctaccagtgactactataccattgtcaaaatgagcaatcatgccgtcgtgggagtattccgccagcatgtctttgcgcgccgcagcacgcgccgttatgcgccccccatccctgaagaacacgactcctattgcgttaaaagaactccggagcgtgtcatggtccaaatctttcatgacggcaacgaagtttaccgttgcatttttgtgccgcctgccgattattgacggcaggacaaccatgaaagctccttttttcagtccggccttctgcctcattacaagcctgattacagcctgctcttctccctccggccccaatgcgtggacgccggtcacttccggtcctccgcgtgcgcccatcccccagaacgaagttctggtcattgacgaataccccatgggggaatacaccaacgtggggcattttaacgggccggaagggcgcattgtccatgtctctatggaagacaaggaactaatcgactacttcaccagggaagctgcggccatggggggcaataccgtcgtcatcagggaaccgcgcatccgctaccgttccggcgaaggcaagagcagccgggtggacgtcatctatgttcgggaagaaatgggaacacacggtgcggaagacctgggcatggactcgctccccattgatgaagaatctctgcggatttattagagccgccggaaacgtcccaggtgccatttcctgcccggagttttttcagctctttttattggccgcaccgcaatgcgggcactccgcacgggaattccccttctccatataaaaccggaatccgcatatccggcactggaacttgcgcctccgctccaggaaagatcgtatccatcccacagccaggcaaacagataccacagcgcaaaaaccgccggcgcccagtaaaaacaggcgcatcaaaaaatcctggagggtcatattcacggctcttcctccttccattcgatggacatggtgccgctccgcggctcccgggacggaacccagcgcaaagaccgggcgaacctcattgcggactcatccgctccattacttccggaagactccagcaacaaaacttgagaaggaacgccccatacatccaccaccacaaaaaaatcactcctcagccccgtgtgatcttcacttctggaaaaaccggacagggagccggctgtaacaatccgtccatccagccccggggaacaaaaagacaaatagggaatgcatgttccggaaatctccaaggaaggattcatcatggcgcgtatatgaaaatccggatgctgccacatacgccagacctgatccgccacagtgggcacggacacggggggaagaggggccagaggcgtatctgcggaacgcggagaaggcaaagtcacgcccatttccccggtcgggccggccgtcaccggatcagcccaaacggggcctctcacaggcagaggagtattgcgcagcacatactgatgcaggcgcggattatctgcaggcagcagcaccacggcacccggctgatctcccctgctgcggatttccggcacctccacatggacaaaaaggccggcggcaaaagcgcaaacgccaaaaaaaagcatccacagaaaaatacgccagcgcaacaggccggtttccctccagtcaaacgtcaatcccaaatgaaggtcgaaaattttatcccggctctttttattcatcttcatgaggtaaaaagggaaaagatcaatccgcgggctcggcggcaatataacacgtcatccccttggcaagcaccatatccaccagctgctgttccagggcccgtgaaacggaatcatccaaacgcagggcaatccccatacggctcccattctccccatgctcccgggaaatccggtccaattctgaggaaacgccgggcatcccgccttcaatcaggcggtttccgatataaaaagcgggctggtcgccagccgtaactgaaataaactcaacatcccccacaatattcatcagaaaatgggaagaaggagcctttacctcatacccgtacgccattcccacacgggaagtcatgatcgtcagcacgcagacaagaacaaccaaatccagcaggacgaccacctgaatgaaaaacgccccggcgggcaatgttgaacgggtcttgatctgcatgcctttcctccttccctgttgcactcacaagccccggccgttcatgctctctccggcctcgcgcctctgccgggcatcacacaccaggcaaacggcctccgtgccggcccgttccagggaatgtacaatctggcgggagcgggaggccaggtaggaataaaacaaataagcgggaatagcaatgctcagccccagggcggaactaagcagggcttggtaaacggcatccgacatggcaagagagggagccttcccttccagaacccccggctgggaataaaatcccaccagcccctggatcgtccccagcacgccgactagcgggctcaccgtagccactaccagcaatccgcggatattcttttcaatctgaaacacttccatctgaacggaatcctctgccacagtccgtagttcttcacgcctcaatccggcatgagccagcacggaagaaaccacgcgggccgcaggtcccggtaaaatggaagcctcatgccgggcttcatccgtctttccggcatttaccagcttggaaatacctcttaaaaaatctccagtattaatttgaatcctgtgaaaatacaaaatccgctccgcgacaaccgccagcgcataaacggccagaaagctcaaaacccagaacaacggacctatcttgatgatcaattcattcataaccctctttctcgcgttagatcatgcacacttcccatgtaaattcaactcaaacctatgtggcccggcagccgagcttctgcagcagccgcgttcccgcccataataagacggaaccgagccacagcagagaaccgaaactcaggagccataccgcatcaaacaggcacatgccggaaagcagcaccgtcacagccctttgaacctggggcctgcccgcctcacgccgtgctacggcggaaatcacgcaggtaaacaaaaacaggccgaaagcataccacagcaaggccggaggaggaacggactctccacccgaacgggcaaatgccaagccggcggccagcacccacaccccacggcacaaccccatcaaaacaatggagccgctccacagtttatggaacacattatacagggaaatcacaatcagcagcaaagcccccacggcaaattccccgcccagcgccatgttcagcaccaggccggacaacccggcagccaaagacaacagcctcagtacggaaacgctcaccgcgccgcacggcacggggcggtccggataacgggcggcatcccacctggcgtccacacggtcattctcccacatgccatacaaataaaagcacagccccatcagcactacgcccccatacagggcgggaagcggcagctccgccccacggacggaagcccacgccgccgccgcgttggtaaacagcgtgggaatattggccggacgggaggaacggagtactcctctcaataaacggcaatcatgcatcgccgcatactgtacagggaaaaacggcgatgaccaagcacatccacagtcagcaaaagtgcgggaaccggcatcccgcccatgccgggcagcatccatacatacccagaaatagattgtctttgcagggctgtcccctatcatgccggaggcattaaaaatactcttctctcccccatgaatatcaggacccacatccaggcgcttctcatctgtaccctgcccctgtccgcacaggggcaaagcatcgtggattcacgggcctcccttccacgggccgtccagcttcacggggatgaaggcagggaaacggtgcggccagacgaatccaagcgcatctctccgaacgaagcgccggcatcccgtgttcagccccagcggatcgtcaaccggattgccgccacagtcaacggccgtcccatcacggccaatgaggtcagcgtgcgtcttatgcccatcggagcacagctcgcggcccagtatcccaaacaggggcccgaattctacaagcaactggccctggcgaaaaaaaacatcattgaagacctggtggagcgagaactgctccgcaatgaatttgaaggcatgggcggcgtcattagggactctctcattgaccaggaagtcaaccgcaccatcctgaccacctttaacggagatcgttccgccttcctgaaaaacctgagcctctccggcatgaccatccgcgctttccgggaaatgacgaaaaaacagcttcaggttcaaatcatgcgggcttccaaatacgaccaggaaataccgcctactccggaggaaatacagcaggaatacgaatctaccaaagaacaataccgggacctgaccaaagacaaaatcaaattcaagaaaatcttcattcccatgctgggggatgactccgcctccacgccggaagtacagctgaacctggcggaactcatcgccaaggaaatcaaatccaaaaacgccacctttgaggaaatggccaaacgctactccaaggatctatatgcggaaaaaggcggtgactggcccgttacggaacgctccacgctctccccggaatccgccgccatcatctttggcgcacagcccagcgaaatcatcggaccgttggtggactccaccggcttcaccatcgtattggtggagaaaaaggaactggcgccgccgccccccctctccgccatcaaggagcagattgacatcatggcgcgcaacaagcgcagcaatgaacgttataaaaaatgggtggaacgcctccggaaaaaagccatcgtcaaaatatacatctgattcttctcctttccccattgccggaccggcccattcaacaaggccggtccggcgttctctctttcatttcccctgtttttctttccgccaaccgttccgtccgctctccttctcctgccgggggcatcttcctctcgcccatatctctggaagacgccttcatacataactggacggcggccgcaagtcatcccgcctgacgcgtggaaccctgctgacgtaatccgggcagaaaccgtatcctgctgaataaaaatcttgcaagatggcagatttccagtcgtaatatcacagatatgttcaccaatattacacgcacgaccctctgcattactgcgttcagcatcgccagcctcatggcggcgcctctgaatgcaaccaaaacggagagcctggattggaactggaaattcgcccgtttcgggaaaatgccggatggcagtacgcaaccggaaccgggaaaagccatgggattcgccactgccaccagtgaagaatccggcaatccggcggacaatgccgtggacggggacaagtccacccgctggtgtgccgccagtggcaaaagcggagaaaaaatcaccgtggacatgggacgccccgtagatgtaaaaaccgttaacatcctgtgggaaaaacaaagcaaccatcttttcaagctggaaggctccggtgacggaaaacgctgggcaactattgaagacaaaacttccgggcaaaacgactccaaggaagacacggtagaaaacaaaaccggcaaaccgcgatacttccgcatcaccgtcacgggcaacaaccagagcaactgggccagcatccgtgaaatcacctttaaaaacgacaagggggaaattatccgccctcaggccgccgccggaaccagtaagtcggacaatccctccagcccctctttcaacgacaaaaactggcgttccttgaacctgccgcacgactggggcgtggaaggccccttccggatggaaattgaaaacagaaccggaaaactcccctgggtcggcattggctggtaccgcaaaacgctggaaatcccggcggacgccaagggcaaccaattctatctggactttgacggcgttatgtcccgccccaaaatttatgtgaacggacacctggccggcgaatggaaatacggttacagctccttccgcgtggacatcacgcccttcctgaaattcgggcagcaaaataccattgccgtcagagtggacaatccccccagcacctcccgctggtatccgggcggcggcatctaccgccatgtgtggctcacggaatccaaccctgtgcacatcgaacactggggcgttttcgtcaaaactccggaaatcaccaaatccgccgccaaggtggaagtggacaccacggtaaaaaacaccacggacaaagccgtcatccccactgttactgaagaaatcctggacggaggtaaaatcgtagcctccacaaccaccaaaggggaagaaattcccgccggggaaaagggcaaaatcaccagcacgctgacgctcaaaaaccccactctgtggaccctaaacgctccccatctgtataagatgaaaaccacggtcaggatgggagacaaagtcatcgaccaaaaattcaccaacttcggcgtaagaaccgttgaatggaaacccacgggattctaccttaacggggagcgcgtgcagctcaagggcgtttgccagcaccatgacctgggaccgctcggctccgccgcccacactcgaggctatgagcgccagattgaaatcctgaaggaattcggcgtcaactccatccgcacgtcccacaacccgcctgcgccggaagtgctggacctgtgcgataaaatgggcatcctagtcattgacgaacttttcgacgtatggcaatgctccaaagaaggcgtcaacaacgaatcctttaacgaatggcatgaacgggacgtggttaacctctgccaccgggaccgcaaccacccctgtgtcattgcatggagttcgggaaatgaagttccggaacagggaatgaaaaatctgcaccatatctcccaaaccctgacggatcttttccaccgggaagaccccacgcgtaaagtgacttccggctgcaacaacgccaatgccgcacgcaacggctttggggacaccctggatgtttacggctacaactacaagccctgggcctataaggacttcgccaaggaccgcccccaccagccgttctatggtgcggaaaccgcctcctgcgtcagctcccgcggagaatacttcttccccgtggactggaacaagggcaagggattctacctctaccaggtcagttcctatgacctgtacgcccccggctgggccaaccgtccggatgtggaattcgccgctcaggaagacaatcccaacagcgcgggagaatatgtatggacgggctttgactacattggggaacccaccccgtacaatctggacgccaccaacgccctgaacgtgccggaagggccggaacgcgaaaagctgatggcggaactcaaaaaactgggagaccgcgccccctcccgcagctcctacttcggcatcgtggacctgtgcggcttcaaaaaggaccgcttctacatctaccaagcccactggaggccggatctcaagatggcgcacatcctgccgcactggaactggccggaacgtaaggggcaggtaacacccgtgcatgtctacaccagcggggatgaagcggaactcttcctgaatgggaaatcccagggcgtccgcaaaaagggcaccggggaaaaggaccgctaccgcctcgtgtgggaagacgtcaaatacacgcccggcaccctcaaagtagtcgccaaaaaggacggtaaaatctgggctacggacacggtaaccactaccggaaaacctgcggcactcaccctcaagccggaccgcaatgaaatcaagggagacggctatgacctgtcttatgtcaccgtagccgtccgcgacgcccagggccgtatggtgccccgaagcaaaaaccagctcaccttcagggtaagcggccctgcggacatcgccggcatctgcaatggtgatcccacggacttcaccaccatggcgaatccggaaaacaagaaaatcatgaaaatcaaggccttcaatggtcttgcccaggtcattctgcgctcccgcaagggagaatccggaaaagtgacgctccaagtcatctccaacggactcaagccggctcagacaactgtgacggtcaaataaaaaaacaggaaaaactccgttccagccgccgggctccatcaggaaacccggcggctttttcatcacattattccggggaaaaagagccatctttccaccctctcccggacaggtagggattgaaagaaaaaaactttatgctacccttttgcccatgtctgatctgcccaaagcatacgatccctccctggtggaagaaaaatggcaatcccgctggattgaagaaggttgtttcaaggctgacccggcttctgaaaagcctgcctactctgtcgtcatccctccccccaacgtcacgggagtgctgcatctgggccatgtgctgaacaacaccattcaggacatcctggtgcgccgcgcgcgccaaaaaggatacgaagccctctggctgcccggaacagaccatgccggaatcgccacgcaggtaagggtggaaaaagacctcaaacagacaacgggccggagccgccacgatctgggccgtgaagccttcctggaaaaagtctgggaatggaaagaaaaacacggaggcatcatcatcaaccagctccataagctgggttgttcctgcgactgggaccgcgaacgcttcacgatggatgaggaatacaccaaagccgttggacaggtcttcattgaactctttaaggaaggactcatctaccggggccgccgcatggtcaactggtgccctgtatccctcacggccctctctgatgaagaagtcatcatggctgagcagaaaagcaagctctacaccgttctttacaaactggaagacgggtccggagccctccatgtagccaccacccgcccggaaaccatcatggcggacgtggctgtggccgtcaacccgaaggatccgcggtacgcccacctcatcgggaaaaacgtcatgcgcccgctcaatcccacccccattcctatcatcggagatgaatatgtagaaataagattcggcacgggcgctctgaaaatcactccggcccatgataaggccgactttgaaataggccggaaattcaacctggaaattatcgacatccttacccccgacggtcatatcaactgcccggaagtgcccgaactccacggcatggaccgctttgacgcacgccgcaaatccgtggaaatgctggaagcctccggcctcatggtcaacattgaagactatgataacaaagtcgggttctccgaacgcgccaatgtcccgattgaaccgcgcctctccatgcagtggttcctcaaatacccctgcgtgaaagaagccgcggacgccgtagcgggaggggatatcacttttcgccccgcgcgctgggcgaaaacctacgcccactggctggaaaacattcaggactggtgcatctcccgacagctctggtggggccatcgcatcccggtctggtaccgcaaagacaaggcggaagaactcaggaacgccccggcgctggacgcctccgcactggaacagggcttcctctacgtgggaaccgaaccgccccaggacccggacaactggattcaggacaacgacgtaatggacacatggttctcctcctggctgtggcctttctccaccatggatgaggaaacccgcgccaaattctatcccactacggatcttgtcacgggaccggacatcatcttcttctgggtggcgcgcatgattatggccggataccgtttccagcatgacaaaccgttcagcaacgtctttttcacgtctatcatccgtgacaaaatcgggcgtaaaatgagcaaatccctgggcaactccccggatcctctggacctgatcgccaactacggagcggacggcctccgcttcggactcatgcgcatcgcccccacaggaacggacgtgcgctttgatgaaaaccagatcagcgaaggccgcaactttgccaacaagctgtacaatgccacgcgcttccggctgatgcagggagatgccaggggagaaacggcccctcactactcatccgtacatatctccattatctccaagctcaagcaactgcatgcagatgtagaaaaagcgctggcggactacgaattcaacgccctcatccaaaccctgtaccaattcttctggaacgaatactgcgaccgcttcctggaagccgtcaagggtgacctgaaggacggggcggacccagcggcacgggcagccacgctcaccacgatggacacggtgctcaggcactacctggcccttctgcatccggtcatgcctcatatcacggaagaactctgggcctccctgggctttgcggaaagcaacggcggcctgccgctcatgcgcactcctctcccctctgccgaaaacctcctggcaggacttgatgaaagccgcatcaccttggcgaatacccaggccgcagccctttatgaaacggccaacaaggcccgcaacctgaaagcggaatacgacctttccaacaataaaaacgtcagcttcatcctgaaaactccccacgacgtaccccaggatatcctctcccgtctggccattttggcgaacgccaaatccgtcatccgggacgcagcttactcctcccccaagggaacgcctgcggccctcacgccgcttggggaactcttcctgcccctggaaggccttattgacgtggaagcggaaaaggaacgcctgggcagggaactggacaaaatagctagggaaatcgccaaatccgcggccaagctgggtaatgcgggctttgtggaaagagctccggcagaagtcgtgaatcaggaaaaagcccgtctggcggactgggaggcaaaacaatcccagttaaaagggatgcttgattccctttcctaaccatctatcattccgggaatgaataatattcaaaagtactttgccggccgcgagcaattcattgaattgcttgaagcggtgggtatacgtactcttgaacaattcgcttccgcggacccctccaccgttttgcctgaacttcaccaggcaaaacggatgctgaaactgcagacggaaattccttccgctcccgttttcagggaatgggtgaatcaggctctttcttctcctactgcgccggaaccggagcttcttcccatccatgagggcgacggcctcccccttgccactcccgttgacccttcgattactgattcttcagaaaacagaagggaacgtgggcgttcccatacggacggacctccaaaacatctctccgccaaggccaggctgcaggaagaacacagctaccagcccgcaaaacatgttcacacccacaaggagccgaaaacctaccttcgcaaaaaaggcatcaagcacatgacctccttccggacatggatgggagccgttatcgtcctgctcctgttcatctgcatcctcttctccatttcggtcaccacccttgtgcttctcaatggagaacgaggctggccgttaatcagcctctgcttcggcccctggattctggcgctggttctctatctttccctggcgcttccccggaaatgcagcgtgtgcagggcccatgtcttttcctttaaaaaatacacccgcaataaggcggcccaccatattcccctgttcggctacgtattcgccacggcactgcatatattcctcttccgctggttccgttgcccggcctgcggttcctcccagcaactgggaaaaccccgtaccgaaccgcacaggcattaacgaagcttaattcctgcgccaggcttcacggtatcccggcctcctgcctcctttcttccccttacctggcattcggaaggcggttcctccatctgtccgtcccttccattatctgcccctattccccgcacttcaaccccacgctctgacgggacaggaagcccctgcccgcttccgtatctcatggaacggctcccggcaacgcccccttccggtaacttattctataaaaagccaccatgaggaaccgcctcaaaaccggctcggaaaaatccggcaagaaggccgtttctccgtctcttccggataaatacgtttcctccttcctccggatatcctagcaactcaaacatgcgttcaacgtcatggaaaagcatatccctgaaaacggcagtccagaaaaacaaccggacatttcaacaaccggaattcccccctcataacctattccggatttgccggcctcctgcgccaggcaagggctgcgctccggcaaccttctccctatatgggaagcacaccgtaatgaaaacttatcagaaaaacggggacaataaaaaacgccatcctccttttcggaggatggcgtccaaaatcctgagacgtctcggttagagcacttccggagcaagggaaacaatcttcatgaacttcttttcacggagttcacgagcgaccggcccgaaaatacgggtgccgcgcgggttgttgtccttgtcgatgatgacgacggcattgccgtcaaaacggagcacggaaccgtcatcacggcgaatcggggcggcggtgcgcactaccacggccttcaccacggttcctttcttcacggaagcggtgggaatggattcgcggatgtggcaggtaataatgtcgccaatgtgagcctgacgggtgcgcttgccgataacgccaatcatcttggcggagcgggcgccggtattgtcggctacctggactagggattccatctggatcatggtatcaaatctcctttacttaatggttgattcctgattaatgggtaagcacttccaccagttcccagcacttcagcttggaaagcgggcgggtttcaacgatacgtaccttatcgcctaccttggccgtggaattttcgtcatgggcatagaacttcttgctcttcttgacgatcttcttgaacttggggtgcggaacgcgggcaacgtattccacaacgatggtcttgtccatcttggtggaagtcaccacgccgacgcgcgtcttgcgaaggccgggcttcttggttgtttcggtttgttcggacattggattctaaaagtgttagaatattctgtaattaccggaaatcctcaattaaacctccccggtttcacccttaatggtaagggcgcgggcaaggtccttgcggacggtgcggattctctggttgttttccaactggccggtggcctgctggaggcggagattgaaaagttcttcacgaaggctgcgcaccagagcggaaagctccttggcggacatagcacgaagttctttggcggagttcttatcggacatggtgatgagtagctttagtgttgaacgccttgacgatagacgaagcgggttgatacgcccagcttgttggaagccagtcgaagggcttcacgcgcctgggattcggtcacgccgcctacttcaaacagaatgttgccggggcgaaccacggctacccagccttccacggcgcccttacccttacccatacgagtatccgggggacgggacgtaaaggatttctgcgggaaaatgcggatgaacaccttacctttacgtttcaggtaacggttgatcgcaatacggcaggcttcaatctggttgttggtgacccaaccgcggtcgagcacctgaaggccgaagtcaccaaaagcaacataggtaccgctggtggcattgccggaacggctgccgcggtgcatcttgcggtgcttcactctcttgggcattaaaggcatatcttattcctccttgtgttaagtgtgatgaacaaatgtggtagcggctttcttaggcgcgcggacgacggggtccgcgagggccggacggacgggaattctgctgggagacgacttcatcgcgcttgttgacccagcacttcacaccgatgatgccgtacagggtacgggcttcggcaaagccgtagtcaatcggagtgcggagcgtttgcaacggcaccttgccttcgcggtaccattcggcacgggcaatgtcagccccgccaagacggccggcgcagcggatgcggatgccgtcggccccgcgttccatggcaacctgcacggcgcgcttcatggcgcggcggaaggaaacgcggcgttccagctggacggccacgttttctgcaataagctgggcgtccgtttcaggggaacggatttccacaatgtcaatgttgacctgggtggaagcgccgcacaggctctggaggtactggcggatcttttcaatttcctcacccttgcggccaatgacaagccccgggcgggcagtgtggacggtgatgcggacactgttccaggcacgctcaatcacgatgctggaaacggcggcggacatcaactgttccttgatgtacttgcgcatcaccaagtcttcatgcagcttggtggcgtaatcctggcccgtggcgtaccacttggagcgccagtccttgttgacggcgaggcggaacccgattggatttactttctgacccatgatattagttcagctatatgtgtgttagattggtatggcctagccttcttgatcggccaggataacggtgatatgggatgtacgcttgcggatcatgttggcggatccgcgggcgcggggcatcgtgcggcgcatcgtgggcccttcatcgaccatgacggacttgaccaccagcgtatcaacggacagttccgcattattctcggcgttggccaacgcggacttgagcgtcttattcagcaggtaggcacctttcttgggggtgtaggacaggatgtcggtcgcctgggagacggacaagccttggatttcttgagcaacatcgcgcatcttcttggcggagatgcgggcgtatttgtaaacagctttcacttccatgggtttttcctcgtagtgcaggttattatgaagatgatttagtcgttggtttttactgaggcagaatctccgacgcgcaccggatcggctggcgtctcaagtttctgaacaagcgcgccacatacttccttgcggacgtccgtgactacggcttctccgatggtttgagctccccgggttaaccgaaccggcatcccgacttgcattcctgccgttctgccggtattcagcaccaccactccggattcggaatcaatgctgagcaccttggcttccgccagggttcccgcgccatctcgcacgggctgttgcctgtatcccagaacggattccagcaggcgcagagaactctccacagccgtcctggcgttcgcatcttcggatatggcttgtttcatgtaggcaaggatggctccggagagcttgacggatgcctgctccaaccgctggacgcggtcattaaaagcttcgatgtccgccatcgcctgaatcaggcgttcctcgctgttacctagcgcagcgccccccaaagcttccagcctggaacggatgtccaccagctgtgcggccgccttgtcggcgtcgctgcgggcctggacataggatgccttgagggccgcattctgcttttcgaggcgctcgattctgcgcgtcagtgccgccgtatcctcttccgctccctgcaacgccccgcccagccctaccaaggtggtaagagagtatgcaaggatggaagaagaattcgacatgttgattgttaacttactgattacttcttaccgataccgccgtgctgtttgaagacacgagtcggggcaaattcaccaagcttgtggcctaccatgttttccgtgacgtacacggtggcaaagttcttgccagcgtgcaccaggaaagtcaggccgacgaagtcaggcgtaatcatggatgcgcggctccaggtcttgatcggcttgcggtcgccggattcaagctgagcgtcgatcttggcgagaagcttttggctgacaaaagggccttttttgagagaacgtcccatgttatataatcctagttaaagttataatatattgattacttggcattgcggcgctgtacgatgacggagtcgctgggcttgcggagacggcgggtcttctggcccttgacgtggccccacggagatttgaggtgctggcgaccgccaccggacttggacttgccttcaccgccaccgttcgggtggtcgacggggttcatcgtcataccgcgcacggtaggacgaacgcccatccagcgggtacggccggccttgccggacatttcgttcatgtgctgggtattgcctacctggccgatcgtgcagtagcaatcttcattgaaacggcggatttcaccggaaggcatcttgatcagcgcgtaacccgcttcacggttggaaacgatggcctgctggccggcagcgcgggctaccttgccgccggaacccggacgaatttcaatgttgtgaacggaagtacccagaggaacgtttttcaagggcatggcattgcctaccttgggagcaaccttctggccgctttccaccttcatgcccacctgcagccccgtgggggccagaatgtaggatttttcaccatccttgtactcaatcagagcaatgcggcaggtacggttgggatcgtattcgatagtaaggacagtagcgggcacgtcaaacttgttgcgtttgaagtccaccaggcgatatttgcgcttatggccaccgccaatgtggcgggtggtgatgcggccattattattgcggccgccggatttcttgaggggtctgcagagactcttttccggggtagaggtggtgatttcgtcaaaggacggccacaccttgtaacggttagagggagtaactggcttgaatgacttgagggacatgatagctttccttcctaataggggctttaaacgaggtcaagggtttcaccgttggcaagcttgacgtaagcttttttccaatgagcggtgcgacctgcatcagagcggcgctggcgcttgagcttgccgtcatagttggcggtacgcacggatgcgaccttcttgccgaaagcaacttcgacagccttcttgatttcgattttgttggcgtcacgatcaacttcgaagaccagctcgccggtagtttcctggagcatggtggccttttcgctgatgcgcaccttcttgatgacttggtaaatgtctttcatggcttcttaagcagtacggctggcgagggtttctaaagcgttgtcaacgaggatcactgcatcagcattcatgagctgttcaatgttcacttccgcagcggtcatcaggagaacttcctgaacgttgcgggcggcacggtaggtggtttcgtcaaaggaagctgccacaatgagcaccttcttggcatccgtcaggtctttgacggctttgatgaaagatttggtcttgccgtcagccacggaaaattcggaaacggtgctgaccttggaagcggcaatcaggtcacccagtacgcggcgcagagccaggcgtcgggtgctcttgttcaccttcttgctgtagtcgcaggggcggggaccgaagaccacgccgccgcccacaaagatgggagcgcgcttatcgccgtgacgggcattaccggtgcccttctggcggaagatctttttgttattgccgctgacttctgcgcgggtcttggaattggcggaaccggtgcggcggttcgcctggtaagccacgatcaggtcatgcacagcctgggagcccttgtcactgcctacaacctggatgttggcggcggcggcggcttctaatgtaaaggtatttgcggacatagataggttttcctataatcaatgtgaggttaactaaagccttacttcttcttggcggggcgaatcacgaggtaggaaccgcgcgcgccgggcacagcaccggagataaggatgacattatcttccggacgaacggcgacgaccttcaggttctgcaccgtgcgcttggcattgcccatctgtccgggcatcttctggttcttccagacgcggccgggggtggaacagccgcctacgccgccggtacggcggtgcatcatggagccgtgggcggcgggagaaccgtggaagttgtggcggcgcatcgcgccctggaaccccttgcctttggaagtgccgatcacatcgacccactgtccggcggaaaagagatccacgccgggatcttcagcgccttcagcaggcaattcagacgcttctacgcggaattccttgaggagtttggtgggctggatgcccagtttcttgaagtggccggcctgaggcttggccacgcgactttccttctgcgcatcaaaggcgacctggatagcattgtagccgtccttttcttccgttttaatctgagcgaaggtgttgcctttgacgtcaatgacggtcacgggcaccatagcgccggattcctggtcaaacaggcgggtcataccgaccttttttccgataagtcctagagccattgtagtgtgtctttctgttttttaattacttatccgggtaccaaactagatgcggatcgtgatgtccaccccggccggaagattaagcttcttgagctcatcaatcgtgcgcgcggtcggatcaacgatgtcgagcagacgcttgtgggtgcggatttcaaactgttcggccgattttttgttgacgtgaacggagcggttcacagaaaacttttcaatgcgggtcggcaacggaatcgggccgtgaactttggctccggtgcgcttggcggtttcaacgatctcctgggaggagcggtcgatagcgcggtagtcaaatgcgcggagtcgaatgcggatttttggactttgcatggacgtgcggtctattggttatacttcaaaggtttgtttatttagccttctcgctgacaatctggtcaacgaggttctggggcacctgttcaaagtgggagggctccatggaataggaagcgcggccactggaaagggttcggatggcggtggaataaccgaacatttcggacaaggggaccatagccttcaaaatgcaggcgttggccttgttttccatgttgctgatctggccgcggcggcggttcaggtcgcccatgatgtcgccctggtaatcggtcggggtggaagcttcaacggacatgatgggttccagcatgatcggcttggctttcttgaaagcgtccttcatggcgaagatagcagccatcttgaaagcgttttcattggagtccacttcgtggtaggaaccgtccaccacttcaacgtgcacgtccaccaccggataaccggcgacgacgcccgtggtcatggcttcattaagaccggcataaacggcgttcatgtattccttgggaatggcgccgcctacgatcttgttttcaatggtaagccccttgccacgttcgttcggcttcacatcgatgaccacgtggccgtactggccgcggccgccggactgcttgaccagtttgccgtcgccatgggcaggggcagtaatggtttcgcgataggcaatctggggcttgccgatgtcggcttccaccttgaattcgcgcatcaggcggtcaataatgatttccaggtgaagctcacccatgccggaaattagggtctggccggtttcttcatcagtcttcacccggaaagtcgggtcttcttcagacagacggcccagagcattggacattttttcctggtcagccttggtcttgggctctaccgccatggaaataacggtttccgggaaggtggggggttccaggcagatatcattgtccgggctggtgatggtgtcgcccgtggtcacgttgcgcagccccacgatggcggcaatgtcaccggagtacacggcatcaatatccgtatgctggtcagcctgaatctgaatgatgcggcccacgcgttccgtcttgcgggtgcggggattgtacacggtgtcacccttcttgagaacaccggagtacacgcggatgaacaccagcttgccgacgaatttgtcagcccagagcttgaacgccagcaccatgggcttggcatcgtccgtagcggtgatttcgaaggtcttttccggatccagcgtgctttccgcgtgggcgggaacggtttctaccggggaggggaggtaatccaccacggcgtcaagcaggaactgaacgcctttgttcttgaaagcggagccaccggcaacaggcacaaatttgttggcgatggtggcgcggcggatagcttccttaagctctttgggcgtgaagggttcttccatgagcaccttttcagcaagctcatcgtccacgtcagccacacggctcacgagttcatggtaggccagttcggcttcttccttgagttcggcgggaatatcctcaatcgtgtaggtggagcccaagcggtcgttgtcggcgtaaataacggccttctggttcaccacgtcaatctggccgcggagctggtcttcagcgccgatggggatcagaatggcagcggcattcgcgcccagcttgttgtggatatcgtccagcacgttgttgaagttggcgccggtacggtccatcttgttgacaaagcacatgcggggcacgctgtacttggtggcctggcgccacacggtttccgtctggggctgcacgcctgccacgccgcagaacaccacgatggcgccgtcaagcacacgaagggaacgttccacttcagcggtgaagtcaacgtgtccgggagtgtcgatgatgttcagctggaaattttcgccttcgaacactttgctgataccttcattcttcacctgcttccagttggtggtgacagcagcggaggtaatggtgataccgcgttcgcgttcctgctccatccagtcggtcgtggtggaaccgtcgtgggtttcaccaatcttgtgaatcatgccggtgtagaaaagaatacgctcggacaacgtggttttgccggcgtcaatgtgagcggaaataccgatattgcggtaacgctcaaggggagccttgcgattgggattatttacgtgatcggacatagtgtctggaaagtatctgtagtgatcgaaagtgaatgattcggctgacagtcgcagaaggaattaccagcggaaatgggcaaaggcgcggttggcctgagccattttatgaacgtcgtcgcgcttgcgaacggaagaaccctgattgttggcggcttccttgatttcgttggcgagagccttgtgcatcggcacacccttgcggttgcgggcgtagttcacaatccagcgcatggccagggattcggaacgggccggatccacttcaagcgggacctggtaagtagcgccaccgacgcggcggctctttacttccacacggggtttggcattttcaatagcgcgggtgattacttccagaggatcaatgctgtccgtgccttcgttagccatgtcaatagcggcataaacaatgcgttccgcaagggagcgcttgccatccagcataaccttgctgatcagtttgccaacaagagcgctgtcgtaacgagggtcacgacgttcgatttttctataaacgcgtttacggcgagccataatatatagtaggtaagatgtttggtttacttggcagcagccttcggacgcttggcgccatacttggagcggccctggcggcgcttgtcgacaccgaggcagtcaagagcgccgcggacgatatggtagcgaacacccggcaagtccttcacacgaccgccgcgaacaagcacgatggagtgttcctgaaggttatgaccttcgccgccaatgtaggcgatcacttcttcaccattggtaagacggactttagccactttacgaagagccgagttcggctttttgggcgtacgggtcatcacctggagacaaacaccgcggcgttgcgggcagctatgaagagcgcgtgatttggacttctcttccggagtaatacgtcccttgcggacgagctgattaatggtcggcatgttttcctgctttggttgtggttcgtcggtctgatccgatattcaaggcgaacattcctttttataagcaggaagcgcgccttttttccggaggcaaacccgatagaaaacgtatttcttgtgcctttcggcacgtttggggacggccaatataacgtgattttatatcatgacaagtcttttattcatcttttcctaaatattttatccgttccattttccccgctccttttaaaactccatttcgggctcccgggatctcttttcctccccgtccagcagttctccacctatggaggatgaaacaaaaaatcttcttcacaggcaaaaaaaccatttcttcatgtccggtatgttaccgcagaaaaaaatgcatgaagtgccgaagagacacaaaaaacaagctttccatcagaattcacgaaattttttttcataaaaacggcagccggtctattatttattgttaacccgcctgctttcccattttaccctgtccggaaagcatgacataaaaaaatccgtttccggaacgcatccggaaacggatttcatcaatgaactcagcaagccgctatttcccgggggtcaccagagaatgtccggacatttcggcaggctgtttcaaccccatcaggctcagcagcgtgggagcgacatccgccagaatgccatcggagagagttacctggtccttgtcgtccgccacgtaaatgagatccacaaggttggtcgtgtgggctgtattcggagaaccatcctcattgcgcatgtgttcggcattgccgtgatccgccgtaataagcagcttgccgccaagttccaacaccttcttcacacatttttccaaggcgctgtccactgcttcgcaggcggcgatgccggcttccacaaatccggtatggccaaccatgtccccattggcgaaattcatgatgaccacatcatacttgtccacagcgtccacaaacttatccgccacttccgccgcgctcatctggggcttcaggtcataagtagccacttcccggggggaaggaacaagaatgcggtcttctccggggaactgggtctccacacctccgttaaagaagaaagtaacgtgggcgtacttttccgtttccgctatgcggagctgggttttcccggcttccgacacaatctgcccgaaaatattgttcagctgttcctgttcaaaaacaatgggagagggatacttggcatcgtattccgtcaacgtcacatagtgcactttgggcgttacttcacggtcaaagccgtcaaattcgggataaaggaaagcgtcgctcatctgccgggcgcggtccgcacggaaattgaagaagaacaccacatcgttgtccctcacgcgctgctcgttgccataggcaaaaatgccgggcttcaggaactcatccgtctcccccttcgcataacactgctccacatattcggcaggggagcaggagcactgttcgccgcgccccagaacgatggcatcccatgccagcttgttgcggtcccagcgcttgtctcggtccatcgcatagaaacggccgacaaccgtggcaattttggcgccgtacggcctgacggcttcctccagctggcgaataaagccggctccgctggttggcgagcagtcacggccatccgtaatggcatggatgcagatatcgcggacacccgcttcataagcatatttgacgatgccgatcaaatggttgatatggctgtgcacgccgccgtcactcaccaggccaagcaggtgcagacgggaagaagcggcctgggaaaaagcggttttcagcacggcgttttcccccatggaaccatctttgatggcattatccacccggcagaggtcctgaaagacaatgcggcccgcgcccaggttcaagtgccctacttcggaattgcccatctggccgtccggaaggcccacgtcctccccggaagcgcccagcaggctgtggggatagttggcaaggaggtaatcagtaaaaggggtatcagccagaacagtggcgtcaccgtattctttcgcgacatcaggccccaacggattgcggccccagccgtcgcgaataacaagaacgacaggctttttagaagacataggctttatttacaggcatcccctccttttgaaaagcccgaaatcaggcattccctctccaattccgaaattgcctgagggttgccgcccttccccacacggacgactacatatcttcccttcatcaccggacgctcggaatgaaatacagcaaatttccattccagagaactggttcccaccgttcccaggcttaattctatgctcagccaatctcccagccccgcagagctggagtaatccgcctccacatgcacgcggggccatccgcagtctggggaaagaacatccaccccccgggaacgcaggtactcgtgctccacttcttccaccaaacaaagcagccgggagaagtgggccaccccggaagcatccgtatcatgaaaagctacctggcgcgttctgacaaagggaatgcagggaaaatcttcaggcatgccgtcatcctgccctctcccccggaatcatgtccagccgcaaatgcgcgacaatatgtcacatcagcttgatttgtgacatgccgctctttatatataagagcaagccgcacggcaacggacccgccgccatgaaaaaagacaccattgacaagctgatcggccgcattgaccacatcaaggaggaagacctccagcgcttttttgtcaagctggcggaacagcagggttttttccagcaggtatttgaagccattcaggaaggtctgatcctgctggataacaagggaaaaattctgttcgtcaacaaggctgcccttaaactctttgacaaggaacgtgggcaaataaccccggatgacttctgtattttcctgggcagggactgctcatgggacacgatccagcagagccagaccgccgtctcccgggacacggaaatcttttacccggaacacagattcctgaacatcttcatttcccccatcggcagcaaaaaccagggccacctggtcctgatacgggatgaaacgccccgacataaaaaaaacgcggaaaacattgaggcagaacgtctgaatgccttgacactgctggccgcaggagtggctcatgaaataggcaaccccctcaattccataggccttcatctccagctcctggccaggaaggcaaagcagctgcctccaaagtaccggacggacatggaggaattgctgaaaacagcggagagcgaaaccacgcggctggacgttatcctgaagcaattcctccaggccatccgccccaccagtcccatccgggaaccctacaacattgaaaccatcctcatggaagtgctgaaactgctggaaccggaaatccagcagcgcggcatccaaatcaacacggacctccagcccagtcttcccatcctcagcctggaccccgtccaaatcaaacaggtcttttacaacctgatcaagaatgcctaccagtccatccctccggagggaggcaccattctgctcaaaagcggttatacggatgacagcgtattcgtcactgtggcggataccggctgcggtatttcaccggaggtcatgggcagcatttatgaacctttcctgaccaccaagtccaccggctccggactggggctgcttatcgttcgccgcatcgtgaaggagcacggcgggtccatcacgctggccagccagccgggtcagggaaccaccatcacggtcttcctgccgcgcgtggaacgcaccatcaggctcctgccatcctccattccctcatgaagatgcctgttctgctgattgtagatgatgaaaaacccacgcgcgacgctctgcgcatgggttttcaggatgattatgaagtgtacaccgccgccaatctctcccaggcttccgccctcctgcaggaagaatctccggacctggttctgacggatctgagactgggcggggaaagcggcatggacgtgctgaaagccgctgcctccctgccccaccctccgcaaagcatcatgatgactgcctacggctccgtggatgccgccgtagcagctatgaaagagggagcgtacgacttcgtcaccaaacctctgaatctggacgccgtggagctggtgctcaaacgggcgctccatacccggaacctggaaacggccaaccaggaactcaccacccgcatccaggcggactccggactgcaaaaactcctgggcagatccgccgccatggaacacgtattctccattattcgtcaggtggcccccagcaaaacgactgtgctgattgagggggaaagcggcaccgggaaagaactcgtagcccaggccatccattccctttccggaaggccggaaaataaattcgtggccgtcaactgtgcggccctttccccccaattattggaaagcgagttgttcggccatgaaaaaggctccttcaccggagccggacaacgccgcatcggccgctttgagcaagcggacggcggcaccatctttctggatgaaatcggggaaatagacgccggaacacaagtccggctgctgcgggtgctgtctgaacggaccattgaacgcgtagggtccaatgcatccattcccgtcaatgtgcgcgttatcgcggccaccaacaaatcattgaaaaagctcgtgcaggaaggaaaattccgggaagacctctacttccgcctcaatgtggtgcatatccagatgccccccctccgggaccgccgtgaagacatccccctgctcgccaccgcctttctgaaggaattcgccagggaaaacaacaaggaattcaagcccctttcccgggacgcccttgaagccgtccggaattaccagtggccgggaaatgttcgtgaactccgcacggccatggaacatggcgtcgtcatgagcaattccgccagcatagacctccatcatcttcccccgcaactgcaggatacttctccggaagccgctccacaggaacggccggaggacaatgcacccaacacgcagaatgggcttgtcccggccggggttttgaatttatccttgctggaacggaatgccatccaacaagcgctggcccagtcaaacggcaataaaacggcagcagcccacctgctgggcatcagccggcgcactcttcaacgcaaactacaagacatcctccattcatgaatgagccctcctcggcatcccgcaccccttttatcattatccttatcctgctgctggcaatcacgggggtgcagtactttttcaactttaacgggctgggcactgatgccgccatggaccacgcccaaatcgcccgcaacgtagccagggggcaggggatgaccaccaactggctgaggcccatccagatggtctccggaagcacacgcgccggcctcaacccttttctttcagacgcccagatacacgaacaggaagccatccggactggacaaggcgaaaccctcgtcgatccggaaaaattcaatccctatgccctccgggacacacgtaacgctccgctgaacatcctgacggaagcagctgtcttcaggatggccggcgtccacaaatttgacctgtggagcatgacgggctcatccatgatttacctgcctgaccggattgtggcgggcatttcctgcatgtttttcatcctgtccgtcctgagctgctattacatccttctccggatgtttgacgtcaccatcgcctgcttcacctgcctgacgatgatactcagcaatcttttcctgcaatacgctaccagcggcctcccgcagatgatgatgctctttttctttgcctggggcatccactttttgtacacggccctgcaaaacaaggaagaaaaccgcgcattcctgtggcctctcatcggcagctccatctgtttttcatgcgtctgccttaccggatggatcgggctgtggcccatggccggttttctgatttttgcaggcatccggttcaaaccgcacggcctgtactgcattccgggccttatcactctccttcttttcctggcctaccccatttacattaaccgctccctcagcggaggcttcttcggaacggcttattacaccatcttcacggggctgaccggcaatgaagaaatagcgatgaacgccctggtttccgggagcattcccatcgctgcccaaaaagtagtcacttccgtcatcaacaacattctgacacagggtgacctgctctacgaaaacctcggcaatctccccctggccatggtatttctgctggccctcctgcataaattcaaacgtccggaagtcaaccagtccaaatggggcatttttgccatgtgggtccctgccgtcatcggcatggccatttatacctccaataaaaccggcatttccttagggcaaattcaaatcctcttcgctccctttttcacggcctatggcacggcatttgttctcaacctgatagccaggcattccaacaaagagctaatctccatccttcggggaggcgtcctgctgctctcccttctcatcacttcccttccgcttctactcaaccttccgcacattgtgcgggtgggcatcctgacggccggccgcggcattccggcatggccgccctactatcccctgggccttaaccgggatcttcgcacccagacgacggaaaaggatttcattctcacggaccagccgtccgccgtcgggtggtatgcagaccggaaagccatcggcatccccaaaatggtggaacaattcatggtgctggaacgcattttgaaattccacggcggcaaggtgggcagcattctggtgactccttcttccacgtcaaaaatgaacctccgcaccatttcctcctcctatggagaattcactcccctcgtactggaaggcacggttctgttccagaccaaggataaaaatcccgtgtacctctttgaccacagccaggcgcttgctcccctggcgcagcgcttcggaacgcctgattcccgccaattcatccagggagcggaaatgattctttacaaagaccttcaggaaaccgcccctcaaccttaatcccccatatggccaaacaacggaaaaacgctcccggatttgaagaatccgtagcacgcctggaagaaatcatacgcctgacggaagcccccgtcaccgagctggaagacatgatagccctggtggaagaaggcaataagctcatccgtcactgccgcagtatcctgcatgatgcggaactgcgcattcaaactctcagcaatccggaaaccgttcaggataaaacggataccgatgaaccagaaggcaatgaattctccctcacctgaacttccggaactgctggcaagcatccgcagccacgcagacctgatgaaaatccctgagccggaactgcccaggcttgcggaagaaatccggaataccctcattcactccctttccctcaccggaggccacttgggacccaacctgggcgtggtagaactgagcattgcccttcaccgcgtctttgaaacgccgcgggataaaatcatctttgatgtctcccaccaggcctatgtccataaaatgctgacggggcgcgctcccctgatccacaccatccgccagcacggagggctttccggatttgccaaaatgtccgaatcccctcatgactcctacggagcggggcatgcgggcacggcgctttccgccgccctgggcatgtgcgcggccagggacctgaaaggggaagactaccatgtggtggccgtggccggggatgcggcattcacctgcggcactactctggaagctctgaacaatatcagccagaccaccaaacggtacatcaccattctgaatgacaacgaatgggccatcgacaaaaacgtaggagcgctggcaaaatacttcaactccctgcaaacatcggaaacgttttcctggttaagggataaaacggcctccttcattgaaaagctgggcggcacgcaggccagagactttgctttcaagctggaaggcaccaccaaaaaccttatcttcccgtccctgctgttcaacaaattcgggttgcgctatttcggtcccctggacggacacgacattcccaccctgatacgcacccttgcctacatcaaggacctcaacgaacccgttattctgcatgtggtcacccagaagggcaagggctaccagcccgctctggacaaccccaccaaattccacggcctgggctcctattgcgtgagggacggggaaacgcaggccgcccccacccccacattctcccatatcttcggctccacgctggtggaaatggcgcgcgaggatgaatccatcacagccatcacggccgccatggccagcggcaccaagctggacttattcaaggaagccttccccaaacgctatttcgacgtagggatcgcggaagagcacggcgccctcttcgcctgcgggctggcggcggagggcatgaaaccctacatcgccatttactccactttcatgcagcgctgtattgacatgattcaacatgacgccgcgctgcaaaaactgcccgtgcgtttctgcatggaccgcgccgggctttccccggacgacggccccacacaccacgggctgtttgacattgccatgattcgcagtatcccgaacattatattcatgcagcccaaggatgaagccgaattcgtccacatgctccgaaccatgaaccattaccagaacggccccaccgttatccgctaccccaggggatgcggagccggaacccctgtccccgccaaggcggaaatcctccccatcggcaaggcggaagtacttcagacgggacgggatgtaaccctcgtttccctgggcaccatgatcggcatcgcccgggaaaccgcctcgctgctggaagcccgcggctacaccgtcaccctgatcaatgcccgtttcatcaaacctctggatgatgaatgcatccgccgtcacgcagcacgcagccgggtggtctgcaccttcgaagaccactccatcagcggcggcttcaactcagccgttctcgaatccctggaaaccggagatgtcaaaacgcccgtggaagccatcgcttggccggaccaattcattgagcatggttcggaatccatcctcagaaaaaaatatggactcacagcggaagccgcgctacaaaaaatcattacccacctgaactcctgatctgtttatgaaaacacgcacctttctgctggcagcccttgcgctcgcccttcttcccgtctccgcgcgacaatccctgccggactcctccacccctgcctggattcaggaattcaacaacctgccggaaacaaccagaaaaagctatatagcccaattccgcaaagcggaacagctttttgcccagaaaagaatcatggaatgtcttttttccctcatggagctggaaaaactttatgccgggaatccgggcttatacaacctccgcggcgcatgctacattgaaatccgcaatatcgaaaaggccctggaaaattttgaaaaagcccagaaactggatccctccaacctcaccatccagttcaacctggcggaagcgcattacgtcaatcacgactattccagggctctgaaagctttcacggaactccttctccccttcaaggacaatcccggcatgacgcccctgctgcaattcaagcgttatatctgcgcccgcaaactggataaccagcctcttgccgcggaattggaaaagctgtacggcccgatggatgatacgccgtactactactgcacccaggccatcctcaaactgatggaaggagacaaggaagccgcccaggaacagcttctttccgccatccgcatctacggaggcaccagcgccatccaggcctttacggacgccatgacggaggcaggcatccttccctccccctatgggcaaaccgtcccaaccgaacagccggtaaaaaccggactggaaaaacgccgttaatgaatgcggaagcgacggtcctgaagctttatcccctgggagaaaacggcctgattgccgtctggtgcacggaagaaggccttatcaggacggcggcaaaaagcgccagaaaaaccggcagcccctttgccgggcgtctggacattttctatcagtgtcgcatgcagtggacgcaggcaaagaagggggatttgcacaccctgacctccgcagacctgctttcgccgcgcctggccctccggaaaagctacctccggctcagtgcggcaggctatttcgcgcgcctttttctccaaatgctggaaccggacacgcccatcccggaattttacgacttgctgcagagggcctacacctacctggaaaacaatgatcccacgctacgcgccgtcctgcacttcgaacaggaactcgcccggctgcatggaatagcccacccaggcatcccggcgcacgtcattctgaaatcccacttcggcaagcttcccccgcagcgggaaaaactgctcggaagcctggaacaaaaagaaagctgagcaacatgcctatcccgctttcatcctcagcaggggatgttccccgccccgctcaacacgtcctttctccgggacgggatgcgcattgttccgtgcgcgagattgacttgtccgcagccttcgggcacaatatccggcacggttttactgcatgaagatccttgacagatacattgcccgccagctgctgggtgtcacggccctgggggtaatggccctgagcgccctgctccttctgggcaacctgttcaaggaactgcgtcccctcctggtggaaaacaaggctcccatcagcatcgttctggaattcatcttccaggtcatccccttttcgctgatgttctccattccgtggggattcctgacggccgttcttctggtgtacggccgtctggcctcggacaacgaactcacctccatgcgcatgtccggcatgagcctgtggcgtctgagcgcccccgccatcgccatcggcatcgccctttccggcctttgctactggattaacatagacatcgcaccgcgtgccaagcagtccatttccgagctgctcatcaaagccgcttccatcaacccgaaggggcttctcaatgaaggccaggccattaccaaattcgacaacctggaaatctacatcgacaaacgcgtggacgacgtcatccacggcatgcatatttaccagaaagcggacgaaaaatccccgtctgtggccatgcactcggaacgcgtgaccatggatttctctcccgagaaaaaaatcctcaccctgaatctcatcaatcccctcatcaccacgcaggaagaaggctccatctcccaaagcgtgaccatggacgagatgcctctgagcatcaacctggacaaatcccgctcccggcgcatcaaggccaaccgcttcaccaaccgggaaatccgggaagctctggacacgcccggctatctggataaaaagcagaccacggaattcgccacggaacttcccaggcgcgcctccttctccctagcctgcatcgtctttgccctcatcggcgtgccactggccatcaacacccgcagaaaagacacttccacaggatttgccctgggcatcctgatcgcctcactctactttctggccctgatctttgcagacttgtcccggaaaaacgacacgatgctcccctatattctgctgtggcttcccaacatcatcacggttgccgtggcgttgcaccttcacaaacgggccaggcacaagggataagccccctgcggaagcccttcccgctggcgtggaattagctttcacagtatgggagcttcgggtaacatgatgtgcatgcagcacgtccccaccatcgccatcgtaggcaggcccaatgtcgggaaatccgccattttcaacagaatggcaggcaggcgcatcgccatcgtgcatgatgaacccggcgtcacccgcgaccgcctttccgccccctgcaagattacggaccgcgcctgtaaaatcatggatacgggcggtatcggcgcgcgcctgggcgacggctttgcagaacaggtagaggcagaggcggacattgccataaaaacggcggatctcatcctcttcgtgctggactgccgggatcaccttacccctatcgaccagaacatcgcggaccacctccgtaaatcggacattcccgttatcctccttcttaacaaagccgaccacgaaaaacaggaccttaatctgggcgaatttaccggactgggttttgacgaccatatctttctttccgccgcccacggcagaggcttttccgaattagcctcccggctggacggttttctcaagcagaaaggggctccgcttaaagaagaactggaggaagaaccggaaaacggagaggaaacggcccttcccatcaaggtagccgtagtgggacgccccaacgcaggcaaatcctccctggtcaacgccatcctccgggacaggcgcaccatcgtctccaatgtggcgggcactacccgtgacgccattgacatcccctatctgcacgacggccagccctacgtgctgattgacaccgccggcatacgtccccgctcccgtcgggacacctccgtagaagttttctccgccatgcgcagtgaaaaagccatccgccgggcggatatctgcctgctggtcattgacattgcggcgggcatcacgcagcaggaccgccgcattgccggcatcattgcggaagaaggaaaaccctgtatcatcatcgtcaacaaattcgacctcttccatccgaatgcctcccgcaaggaccgcatggcggaagtggaagaacaggtgcgcagggaactattcttcatcaactacgcgcctttcatcgccacctccgccaaaaaagcggaaggcgtggaaatcatcttcaaagtcatcacgcgcatccgccgggaatcccataacctgcccactaccggccagctcaaccgcctgatccagcttgcccagcagatgaatcctcccggcgccgccagcggctctgccagaaggttgaaaatatattacgccaccacagcggtggaccccaagtacaatactattcccgtcccgcgctacgttcttttcgtcaatgacaaaagcctgctcacggacagctattcccagtacctgcgcaacaaaataagggaagcctaccccgctcccggcattccggtcatcttctccgcccgttcacgcgtgcgcaacgactgatcatccctccttctccgcatgctctccgtcaggaacctcagcgcctccttccacaccagggccggcattgtccgggcggtaaggaacgtgtcctttgatgtagccccgggggaaacgcttggcatcgtgggtgaatccggatcaggaaaatccgtcacctgctactccataatggggctcattccgatgcctccgggccgcattgaaagcggttcagccatgctggacggcacagatctgctccgttgcccggaaaaggaactccgggccatccgcggcaaacgcatctccatgatcttccaggaccccatgacctccctcaacccgtacctgaccatcggggagcaggtggcggaaccccttgtcattcacgaaggggccggcaaaaaggaagcgcggacacgcgcgctggaacagcttgccctggcaggcataccggatgcggaacaacgcatggacgcatacccccaccaattctccggcggcatgcgccagcgcgtgatgattgccatggccctcatcaccagaccggaaatactcatcgcggatgaacccaccaccgcccttgacgtcactgtccagaagcaggtgctggatctcatcaaaaaacttcagcaggacatgggcacctccgtcatcctcatcacgcatgacctcggcgtggtgcgccaatacgcggaccgcatcaacgtcatgtatgcaggccgcatcgtggaaagcgccccggcgaaggagcttctggaacatccccggcatgcctacaccagagccctgatgaaatccattcccgggctgcatgcgaaaggcacccccctctataccattcccggactgcctcccaacatgactcaggagccatgcggatgcagcttccgccccaggaacaccctcggaaacccggcgctctgcctcacggaccgggaaccggagctggtggaaatatctccggggcactcagtccagaactgtccgggctgtctgacttagtttcctttcctgtttgctcgcagataatgctgcgtacaggaaaatccttttaactgaattgatttccgcacaattcttccagaatgccgtaaaaacggcccacatgcactccgtccaccagcacatggttcgcctgaatggctacgggcatcaccatcctgccggaaacatcctcctccaccttcccccaatggataaggggaaagtattggtcccggaacaccctgtaggcgctggccacctgtgtgaatggaatccacggcaggcagctgaatacggcgatatccgccctgtggcacggattcgcctgggcgggagcaagtttggccgcctgcacaaggggaacggcatgttccagaaaatcaggcagctccatccggtattccactaaaatctgagtgaattctccatccgcagccagcaccggaaccagggcattcacggactcatactcccacacctccccttcctccacccgctggcgcagctggggaaccctgttcaacgccttcagcagcacaaacaggcacaaaatgaaaaaggaaactccctcccgtttcgcataacggtacagggcatccacccggaccggggacgtaatggaaaacatggggcagtcaaacgtccggaaatactcataatgggaccttcgaggccaggaagcgatttctattttctttttcatgcacttattttctattcagggaaggctccccgtacacgtttttacatttttgctccggaagcaaaaaaacaggacagaagcagtcaaagcgacaatattccccggctctcccgaaaattccagcatggctgttcccagcgccaacgcattaattaatgcctttatttatccaatcatcaactatgttgcaataaagaacatcctgaatgcccctacccctcgcgaacggaaagcaaatccgttacggacgcatgcttcatgcgccacgcaggcagaaggcacgccaaggatgagagggcaagcaccagaagcacagcacaggccagatgcgcccagggcattgtgacaggaggagtaacgatgccgaagtgatagccgtattccagaatctggatggagcaccaggcgcccaggactcccagcgcaagactcatgacaacggcgcacagggaaaccatcagcgtttccgcccagagcatccgcatcaccatgccgcccggcacgcccaccgcacgcatcaatccaaattcccggcggcgggactgcacggaagccaggacggtgttaagtacggccagaacggcgatcaccatcatgatgatgggaagcttgctcatcgtaaaaatcacatcgtccccacggctggtaacgctttcccccaggctttcccgggtcagggccttcaccagaggcttggcgccttcccctccgtttccctgctctcgcaccttcatcagggcgtattcccccaggtcgttctgaagttccacgttgctaatccccggagcagtatccccccagataaactggaatccctgatgagcgtattcctctttgagccagcgttcatcggcaatcgccaaagcggcaacaaaacccccgcggcgcacgcgcattccgctggtcttggtcaaccagtgccagccgaggaaggaaattattcccgccaccttccagggttctccccgtacggcggcccccctgccccggccgcgaataccaacaaagggttcatttccggaacgacgttcccgggaagacggattaaccagcaccaagtcatccccgaccttcaaccccaccgtccgtgcaaacgtgtccggaatcaggagagaacgggtggattccagcatggcataagcctcctgcgggtttccggaaacaaacacggggttgaacagcggatggctccccccggccatctccgccacgggaatgccggccagtacgatggaacggttgcgcattccggaaaaaccgggggttttcatctgtgccggagcaatatccggttcatccacgtagatgggatacattcgggaattccgcaggctggggcgcgccatcagctctggaacatccggagatttgaactccgtatgcaggaaggaaaccagggttccgggtgttgacgtatccggggaaaaaggaaccagcatggaatagccccatgtctgcacccccacaaagagagagaggcccacagacatggatacggcagttcccacggaacggctgaggttgcggctgagctgcattttcaggaaagaatgcggaatgcgcagcagaaatccggtaatccatgccccggcccactccgtcacgcgcacgaaggtgggggccagaaatagcgcgccggctaccaggccggggtaacccagccagaaaaatatccatttgcgcgtttctgcctccaggcccggcaacagcagggccgcaggctgaagacacacgcatgcgaggcccgccacaacagaccacacaggaacacggctcaccttcccgatgaatccggaggaaggaacggccgcttccagcggagactggcgggaagcgcgccacgcaggaatgatggaagccagcaaggccccgcccacagcgcatacggcggcggttaatacggtggaccaggccagcacgggtacagaggcagagccttcctccagcaggtacaccaggaaaaagcctgcggccaaccctcccagcaatgccggaatgcacaggaaaatcccctctcctgcaatcagtagagcaatttgcacgcgccccagccctagagcacgcatcagggccagtctgcgggcacgttcgctgacgccaatgctcaacgttgtgaaaataatgaaaatacaggagaacaggacaagccagacggacatttccgcgctatccttctgtgaacggacggaccggtcgctggaaagccgctggatgatggaatccgtatccgccactgcagcggaagcctgtaccagctcctgccggaaattctccgcaaattcctttttgtccaccccttccttgagctgaacgtaaatcaaattgggggcaaaaggctgccccgtaattttctcgcataccttcacgggcacaaaaagggaggaaaaagccgggccggacatgccgcccggccccataatgacgccgggggtggccttggcctgcttgacgatgcccacaatctttacgtcgtacacatgcgttcccacgcgtacgttcatgacagtccccactcccgcgctgaaatatttggcgcttccgctgcccagtaccccctccatagctgaggaggaagccatatccggccaaactccctctttcaattcataaggacactccacagcatggtttcccaccaggatggggctctggggaggaattcccatgcggtcgcgcgtctgctcgtcaaagctgccccgctcatttccgcagccgatttggaggcgcggcacctggcacgcggcgttcaccgtttccacaaggggagaggcggccagacgggcgggcagctccgggtcacggaactgcgggtactgtccgggaggaaggggccctttggaaggctccggcaccaggcagaggtcataattccccatataggcctccgcatcattatcaaactccctgaccagcgtatcatagctccccatcatccatacaatgaggctgacggagacaagaatggcgaacacgctgactgccatccggccggggttggcgcgcagatctctccaaatcagtttgaacagcaacgtcataaggcgtcattcagcgtacgttcatagaaggaggacaattccgcaggaccggcaaattccgctgtggatctgtcgtccacaatactgccgtccttgagtacgactacacgatccgcccacatggctacgtccggcgcatgcgtcaccaggacaaaagcacaaccttgcgcacgatgcaaatcccggaacaaatctcccataagccgggtattttcagaatccaggttgcccgtaggctcatccgccagcaccagagcgggaccggagaccaatgcacgggcaatcgccacacgctgctgctccccgccgctgagcgtatccggcatggcatgccgacggtgagacagcccaaccttctcaatcatggcgtccagggcggaaggaatcaccttcctgcctcccgccagggacggcaacagaatgttttcttccacgttcaaggtgcccaccaggttaaacatctggaaaatgaaccctacacggtcccgccggtacaccgtcagggaggcatccgacatggaaccgagatccatcccatccaccgtcaccgtgccggaatccggagccagcagccctcccaaaacgttcagcagagtactttttccggagccgcttgcgcccatcacgacgacgaactctccccggttcacggtaaggctgatatctttcagcacagtgatattcccggaaccggatttgaaactgcgcttgagatggctgacggaaatgacgggggaactcatggcggaaacgcaaggttaaaacgtggtcttcaggcctacttcaaacgtgcgcggctctcccaccgtgcactgcacggcatggcggatggactgcacgtactttttatcgaagatattatacacagccagcctcagcgtagcgtctttcagccatttggattccggcagggggatttccaccgtaaagtcgaatacgctataggaggggatggtgtagttgtccgcaatttttgcgcctcggaacgtagcgtagtaggaatccttgcagcggtagcccaggcccagcaccgtaccgttcagcaatcctccgtcaatgcgatacttctgccagagggccagagcattcggagcaatcgtgggatacacttccccggtggtccggttcttggtacgggtgtaggtgtaggaaagataggaactccaattcttggttatttccccgttcagggaaagttccacgccttccgccctcttggagccgtccgaatagtaccggttggtatatccgtctatggcaacaggcgtattattctggatgatgtcaaaccaggaagcggaaaaccacaccttatcaaccgggctgacccggaacccgaattccatctggtccgtacgccaggaatcggtcaattcctttccgttttcatccagatacccgaagttgggggcggaggtacgggctgcgttggcgaacaacgctacgcgttcgccgaacatgcgggtaattccgaagcgggggctccacgcaaacgcataattattgtccaggctgaaatgcgcgtcaccgcgaacgccggccagaaaacgccactgtccataactgaggacatcctgcagcagaaaacccgccctctgcaccacggtatccgtcgcattggcgccggaataatcgcgccctgcagggaaaaaaggaggaggattgtacagggaaaaatagccattcgtgttcgcggtggcatttgtcaccaggctggaaccgtctccataagtgctgctccccgtgtaagaaacgcccatcagggcttcatgcttcacctgcccggtcttaaattccgccagtgcgttggaataaaaattccagttgatattccacttgtcgctccaggcggcttcatatttagcctttccggaagcaatcatctggttgtaataatccgccgtgctggttcctctcccagcggaagaggaaatgccccagacattatagtccacatcgctgtacccaataccgccgccaatgcggatcgtccatatcttttccagcttgcgttcgaaatccagcatcgccagcagggatttggaattaagccttccgctcggagaaccgtaccaagcgtcatacggccccacaaaatggccgcccaacacagggatgcccatagtcgtcggagaattttgatactggaaactggtcgtcagcaccgtcttggtgcgggaatcatgctgccagcggaaaatgggggacaccgtgtacttctggcctccgttggctccgttgctcagccagaacgggcgttcatactcggcggctaccaccgtacgcagggcaaatccattcgtttcatcccccctgtaccgggtatcgtcaatcgttgcgcggtatttctgcccgtgatgggaaaggcgggcgtaagccgtcaactccgtccgttccagaaaatcaggctccttcaggatcagattgatggaaccgccggcgccgtatgccccgagcgtactggtctgaccgccggaaatggaaccgatggggcctttgacaatctcaatattttctatcagggacgtatccatgccataccccatgcctcgcggaagaggcatgttgccgatctgaacatcactgccggcaaagccgcggatggtgtactggtccgccgtacgggacaaaagcatgtccccacccgtattgacggaggaatccatacgcagcgcttccaccagggaatcggaccccttggaatccatcaggtcccttgtaatgacgtttaccgtttgcggaacttcctccgtcttcatgttcgtgagagtagcggaactgaccgtttccgcccgcagggacctggaacggatggtcatcacgcgttccggcatttcctgcacgccttcctctgcggcggcggcctttgtctcggcataggcagattgtccgagaacaagcaggctcccaatggcggcagcacggtgcaggccgcgcccctggcggcgatggcggggggtattcatgttggataaacgcataggggcaagtataggacggaacaaagaaccgtccattcccgtttgttaacaatttgataacagaccgttccttttccttccggcaaaagcgcatctgatggcagaacggccccgccctttcacaaacccaatgcctgcgcccggctctccgccgcggccttcagccattcccgcaatgcctccttatcccctgtagccagccaattcctcacttgtcccagttgggacagggcttcatccagacgctccagaacagcaggagcattttcctccagaatttcagcccacatggacggttcccccatggaaacgcgggtagtatcacggaaacctccggcggataccagccccagcagcttcacatccccaccgtccagggcgctgtggacgcacagggcagacaaagcatgaggtatgtgggaaatgcgtgccacggaagaatcatgatccgccgctttcatccggatgcagtggcagcccacacgctcccagaacctctggagcaacagcagcacatcttcatgcacatgctcgtcattcgtcaggatgcaggtcgcatcccggaagaggtccccggaagcatgctccataccctgcttttcggaaccggccatgggatgggagccgataaacgccacgccggctttcttcagcacggagcccacggcctggtgaaccccccccttcacggaacccacatccgttaccagtactcccggtttcaataaaggaagcatgtcggaaacaaggcggggcatcacgccaaccggggtagccagcacaaccagatccgccccctccaccacctcttccatccgggaggaagcggcatgggcggctccggaagaacgggcatattccaacggttcttccctcctgccccacaagcgcacgtgcacatgcggcaactgcttcctgacagccagcgccaaggacccgcccagaaggccggggccgagaatggcgacggaggagaaaaaaagctgctttctggaatattctctcatggatttacaggggaatacatcagcgccccggaacatcggcatgttcaggggcgcggcatgatctcgttgcggcggccgcatcagggcacgcggaacttcttaatctcgttgggaaagttggtgtcccgcaataccgtcccggagggatacggcttattggtgctcctgttcaaaatcttgatcttcttggtgcggtcatacgggctgaccaccaccgtgggatccgccgtaggccacgccaccggtacggaagaagaagcgggaggttctactggcctgggggcggcaatgccggaaccggcggaaccactcacgggattaggaacgacgggcttgggcacaacgggagccggaggcgtgatattgttggcccctcccaccatattgccgatggtcccggaattggtccgggcggggtccgggttaaaaccggaattctgcccggccatcggatccagagaattttcacgctgaatatcattcagcaggctatcgccctgggcgcccacagcgccggacggatagacattttccgtaggataaatgccgatggggcgttcattcacgcgctccgtttcacaggaaggcagaagaattgcacctgcggccagcagcacgcctatcgtcggggaagtattcatataatctctcttcgggtgatagctttctgccagcatcctacggtcccgcaacctcatgtcaaccataaagcctgtttgccgaacctcttcatgacaaggaatcttcggcttccgtccccgcacgcgggcaaagccgcccgaacagacgcgctcgccgcatttcttttacccatcggcagcgccggaacagccctggacggactcaacaaaaggaagagccggaaaacggcacaaagacggaacaaccatcactctttatcaacaagcgctccaacaggtactcctgccgcagccttattcggaagaagccggagctccattccgttctccagcgggaagagacgcttccctcccgaacatgccgcgccgacctccggccctcccctgcccgccctcttcaaaaaactggaaaaaacgcttccccctcttcccgggaacgcgcctgtacgggaacagattatccttccctaccccccatgatctgctacaatccgccccacatggatgacgtacagacatctaagaaaaaaatgccctcaaaacaggaatggaggggattttattccctgattctcattcaagcccagaacgctttcaatgaaaaagccgcccagttcctgctgattccgctgggcgtctggctggcttccaccaacgccgcatacgggccggattcctgggtcaactccctccagtacattctggcctgcatctttgttctgccctacattctgttctcccctttcgtcggatggctggcggactgtttctgcaaggcccgcatcattcaattcatgtctttcctacagattctggtactgggggccatgcttctgtgctacaaatacgaaaacattgaaatggccgttttctggttctgcgtcttctccgtccaggcgaccatcctgagcccggccaaaaagggagtggtcaaggacatggtaggctcccggcagctgggctacgcttcagggctgatggagatgagcctcatcctgtccatgctggcggcccagataggcatcttcgcctggttcgacatcctgcaagtctcctccaacgacggctgggaagcagccgctttccccacattcatcctcacctgcatcgccgttcccgtagccattgcgtccctttacctcccgcggtatccggccaaccagaccaggaaattcgaatggaagctcttttacgaacatttcgtgcagctcaagtatctctggagccagcgggacttgaggctcagcgaaatcggcgtgtcctacttctggttcctggccggcgccctgatgctcatctccctccaaatcgcccaggaacaccccattgacggtaccggattcagcatgtccgcggccattctcatggcatggctcagcggcggcacggtggtaggcggcgtcatcgcctccatcatctgccgtaaaaaaattgaactggggctcattcccctgggcgcaatcggcttcactatcgggtgcatattcatgtccttcttcgcacccggctccctccccagcaacatcgggttcggcatcaccggagctttcgccgccgcgtacctggtgccgttaaacgcccaccttcaggacaactgcgacccctccaaccgcagcaccgtcatcgccgccggcaacctgatggactgcctgatggggctggtggccgtcggcttccagctcatgctcaggaatatcttctccatccagaaccaattctgggtgctggccgccctgggcgtggtcattaccattgtggccttccggcttattccccgtgaattcatccgcatgatgggcctctggatcatgaggattgtctaccgctcccgcatcatccaccaggaccgcatcccggaagacggcggggccgttatcgtctccaaccatgtcacctacggggatgcgctgttcctttctctcatctgcccgcgccccatccgatttatcgtggcggaggaattcgtagccatccgctggctcggctggattctggaactcttcaactgcctgcccatttcctcccgtaatccgcgggaatccctgtccaaggccatccaggccctgaaggccggagaagtcatctgcatcttcccggaaggccagctcacccgcacgggaaccctgtgcgccgcgcgccgggggctggaaatgctggcgaaaaaatcgcgctgccccatcgtgcccatttacatggacgaactatggggcagcatcttctcctactcaggcaaccgcttcttctccaaggcgcctctccgcgttccctaccgtttcaccgccgccatcggagagcccattgagcctgacgccgtcaatccccgcatggtcatcaacacgcttcgggagctatcctccacatgcctggaaattgcagccagcatcggcagggatgccatcctgaaccatctggagcgcatcgcccacaagccgctggtcttctctaaaaacgcgcggctctccgggtatgaaatagcggaatgcctgatgaacgataccgtggaagcagagcatccggaactcaggaaatggctgtccaccctgctggacagcacccgctcccaaagccgcctgtgcgacttctggatgaacgcccagcagctggaacgggtgaactccctccagccccgggaattgctgctcaccagcataggacgcgaagaagtccacgaaacggtggccgccgtcctgtggcccatcctcaccagcactcccgtttacctcatcagcgacggggaccacagcatgccggaaggcatcaggcagatagccggttccgatttcctgcgccgcaggctctacagcctggttccgaatacgcgcacgccgttttatgacttcagcggctcgggcgacctggttctccccaacatcggctggcggccctgcttcgccacggaccgcggcattatcctggccatgtccatgaagagaagcgtcttcaagctggatgacggcaccgttcagctcggcatgagggccaggacaagaggacgcctcctccccggcttttaccagaatccccctctttccaacgtcatcgccggggccaccctctccaccccttattccctgccgcccaacctgtacctggacgagtcgggcttcctggcggaactccagtcttccaaccatgaacaataactcctcgtcaacccgccttcccatcccgcagtatgtaatgacgctggcgcacgcggcagccctgcggtcggaggacccgtaccgcaaggtgggggccgccgccctggatgcggacaaccgcgtcatcggcaccgcttacaacggactgtatcccggattcaaggctcaggacaccttctgggccagccgggaagaacgccagaaatacatgctgcatgcggaaatcaacctgtgcagcctgttccggaggggggaagccaaggtggtggcatgtactacgatgccctgtacttcatgcatgcaggcgctgtgcgcccatggcgtaaagaccatttattactgtgagccttatgacaaatccgaagctcctgccatcgccagcctttacggcgtggaactgatccaggttacggactatccgctcagccgacacttcccccttgtcctggacagctgatgcccggaaaatcaatcccggtgcacacggcatgtccaaccggccatggggcggggaacgccgtcaatggcaggatccaaatcaagcccggtttccgtaatggtgcccgaagtaatgacgcccgcattccgcccggcgtcgtcaaaggcaatgttcacattcgccatggtacaggcggagctgctgttggcagccggagcaatattcaatacgccggcattctccccgctattgaaccggtacgtataaaccccgtcgtacacggctcttgtatccattctgataacatccacgtcctgcccgctgaactggagctggaataagatgcttcctccctcaaacaggcttacctgctgtccgctcagggaagtgttcccgtcatctccggactttaccgaccctcctccgcatccggacaacaatccgcacaccgtcacaggaatcagcaacaagacagggaacaactttttcatccccgggaaaatgcacaacataaaactataagtcaagcatactcaactattatttcatttttccaacatttttaacatcacaaaaaaaaccgcctgttttcacaggcggtctcaagaaaacacggaagcgattagccaacccatttccaggtaatgggtatttcaatatcagggtgcaggctgtgcttgaccggacagctcagagcagcctgttccagcagcttcctgtccggataatcggacggaagaggaacggtaatgacgacttccagcttgccgatacggcggggatccgcattcatatgcttggctacttccaccgtcatgccttccagatgaatccccttacgttcggcaacaatacccatgatcgtgctcatgcagccggcaagcgccgctcctaccaggtccgtgggggaaaaggactcacccttgccgttgttgtccacgggggcatccgtggaaagcgtggccccggaaggttcatgaaccatggaacaatggaggccgccctcgtacgtcgttttagtttttaccatggccttattttatacaaggctccccgccatgcaacacacaaacattgaatccccccgttctttatggtaaccgcctttgctatgagaaactttttgaaagcagccgtcggctgcctgggcatgatcgccgggtgtttcagcacgggggaggcccaggacttcggaggcatgagcttcggggaagcgggaaactttggtccgccccagacatccggttcctccaaggccactgtcatctcctatggagaagcctccttcgtcatcgtgacggagctggcgctgccggaccactggcacgtttactacaaaaatccgggaaccgtgggacttcccatggaaggcgccttccagcctgtgcccggcttccgggtggaaggccccttctggcaaatcccggaactggggaaagggcttgtggatttttacggatacagcgggaaagctaaaatggcgttccgggtaactccggaaaaggatgcccccccggaagcgacgttcaccaccaccatgacgtggcagatgtgcgcggaacagtgcgccgccccggaaaccagaaacttcagcgtcacactgaagcgcggagacgggcagacagcccctgacgcggcggaattgaccgggaacatggcagggcttgccgcccccgactgggcggaagggctgaaagcccggatttcccaggaagggaaaaccgtcaccctgcacctcaggacaaacggacgccccgttccgcaggattccgtctattttttctgcaatcagggggaaatcaaccctaccactccccaaaccttcaaaaaactggatgactccaattatgagctgtccatgcaattcaatgacaccacggacggcctttaccccaacaacctgccggacgcggacaaggggaaaccgctgaccagcctttccggcatcctgcgcgccggcagggaaggcatcatcatcaccgcggacgaccgccccttctccggggaatcccaggcaacagccgccggaacggaatccgccccggaatcttccgcttccatccccgctcctccgctgatgggcctgggggaaatcatgttcttcatgttcatcggcggcatcatcctcaatgtcatgccgtgtgtcttcccggtaatcggcctcaagattatgggattcgtccagttgggagggggggaacggaaaaaagtcctggcccactcccttaccttcgtactgggcatcctgatttctttctggatcattactgccattctgattgcgctgaaagcgaacatgtttgactggagcgccccagccggccccggcgtgttcagcggagacttctggctgggccgcggcgcggagggcgttgtcaactgggcgttctggtttgaaaacccctgggtgaatttctgtctgctgggcctgatgctcgccatggggctgagcatgttcggcgtctttgaaataggcgtcaaagccacgaccatgggcaacgacctccagcaccggaaaggttatgccggctccttttggtccggtgccctggctacggtcatctccaccccatgcagcgctccgttcctgggccaggctatcggcgcggccatgctccagccgcctctgggcatcgtactctgcctgaccatgatggggcttggaatgtcccttccctacatcattctgggcgcctttcccgtcctgaccagatacctgcccaaacccggcgcatggatggaatccttcaagcaggccatgtccttcctgatgttcggcaccgccgcctacttcctctggatttacatggccttctttgatgctgaaaaccatcctcaggacatcctgttcctcttcttcgggctggtgctgttttccatggccttttgggtatacggcagatggtgccccatgtaccgcagcagaaagtcccgcatcacgggaggcatcttctccgtaatcttcctgctggccggcttgtactacatgcttccgccggaaggagcagcctggttcggccgcggttccgctcccggggcggcggagtcctccgctgccgcagcgccctccctccaggaggaagggaacatctggataccctggagcccggaagccatgcaggccgccctggacggagggaaacccgtttatgtggactttacggcccgctggtgctccacctgccaggtcaacaaggcctcctatacggatgaagtgctggccgctttcaaaaaatatggcatcgtcatgatgaaggcggacaagacccgcacgaaccccgccattgaccgggaacttaaaaacctggggcgcacggccgttcccgtcaatgccctgtatcttcccggcagaaaacccgtcgtcaccagggaactcctgtccccggcctacctgctggaattcctggaaaaggaaatggaacgctaggacgtcttgtcatgcgggcggcaatccgccgccctccccccaggccatgccgggcagcaggaaacggagagaacttacccttccccgttcaacagcggcagcaacgcgtccgcccatgcctgataacccttctccgttaaatggacatgatccctgaacatgccctccctgaacgtcccgtccgacttcagcagactgccgttaatggataaaatggtggtcctcggaagctccagcctgcgcagcaaacggttaatctcctcctgcctcctgcgcaacgggctgccgggatcggtgccgtagggagtcacctccatcaggatcaaacgggtctccggaaacttcttcaacaggcgtacggctatctcccggatgcccttcaccgtctgcgctgcggcttgcctccccttccagcggccgatattattcgtcccggccagtaaaacgcaatagcggggggaagtcttgaccgccagtttcgtatcctccatacgccacagcatgctgtccgtcctgtccccgctcactccgaagttgaccgccttcatcggcagaaacagcctcttccacagcgcggcaccttcccgttcccagcattccgtaatggaatcccccacgaacagaatgccgcattccttccccagcaaattttcccgaaccgccctgtaacgggccggaacccacggctgggtattcagtttgggaacatcgggcggatccggagcctcatcagcaggagacgcatacacggcagaagaagcaaaggagagcaataaaaaaacggcagagaaaacagaagcattcatctttttccgaatacgcggcccggaaaagcattctttcccctgccgggaaaatcatgttctcaccgccttgcccaatacctccagaggctggccggacaaattcaattcctttaccagaaaacggacaatcagcaggcttgccagcgcatcatacaaagcgtcatgccagcggcgcgcaggaagcaacgcctccacggaacaggtcaaccccagggcgccgcacaaagaagacagggaataatcctccagaccggggacacacatcctgcccaaagccagcgtatccagccacggaccgaagccgtggcccggaaaccgccgcaggaacttccgttccgtagccggattatgccccaccaccacggcctgccccagccgggaacgtatctccggccacagggaaggaaaagacggggcatccgccagcatctccgtagtaatgccgtgcacctgggaggcggaccataaaaccggcttctccaccgcaatataggaagtccacaactcaggttcgtcctccaggcgggaacatgcggctatgcctatctggacaggctggtccgtctccccccgggccgcgccggcggattcaaaatcaatggcggcgaaacgcaggccgccgattgtatccgaaagcggaggcatatcagaacaactccagctgagcgtattccccgacaggcatatcgtcgtccatgtccgtattcttggctctcggttccgccagccgggagcgcccctttttcctggggcgcgtggaattcatctccagatgggacaggatggccttggcgcggtccacaatgacggcaggcatgccggccagtcgggccacctgaatgccgtaggacttgtccgccgctcccggcacaatcttgcgcagaaacacgatttcctccttccactcccgcacggccacattgtaattctgcacgccctgcctggaattggccaaatccgtcagctcatgataatgcgtagcgaacagggtgcgggacttcagctcgtcatgcaggtattccgccacggcccaggcgatggaaagaccgtcaaaggtggccgtgccccgcccgatttcatccagaataatcaaggagcgctccgtagcgttattcagaatcagggaagtttcgctcatctccaccataaaggtggactggccgcgcgccaggtcgtcgctggctcccacgcggcagaaaatgcggtccaccaaaccgatgtgggcggcttccgccggcacatacgctccaatctgggccatcagcgtaatcagggccacctggcggatataggtgctcttgcccgccatattgggcccggtcagcagaataaggcggttttcctccggttccagaaaggcgtcattgggaacgaacacatcgccggaaacattctgctcaataacgggatgacggccattgacaatgcgcagggtcatggaattgtccagaacggggcggcagtaccggtactgctgcgcgccctcagccagccccagcagcacatccagatccgccatggcgtccgccgtcatctggatatcgtcaatgtggcggcccacttcttcacgcaacaggaggaactgctcatactccacctggcgggaacgctcgtccgcccccaggatggtattctccatctgcttgagctccggggtaataaagcgctccgcgttcaccagcgtctgcttgcgctggtaatccgggggcactttatcgtaatggctcttcgttacttcaatgtaataaccgaagacgttattaaagcgaattttcagggaatcaattcccgtgcgcttgcgctccttctcctgcagccgtgccagccactccttcccgtcgcgggaagccagccgcaattcatccagaccggcgtgatacccttccctgatgatgccgccctccttgatggtcacgggcggttcctccaccagggcgcgctggagcaaatccaccagctcatcaaaacagcccatgcgggaacggatgctctccagcatctccccgccgccgggcagggattccaaatcatccctgagcgcggggatgcgcgacagggaggaagccagcgcctgaaggtcgcgggcattcccggcaccctgggaaatgcgccccgtcagccgctccatgtcccgcacattcttcaggctctccctcagcttgctcatcaggtagggctcctgcagcagaacggcgatcacctcctgcctcgccaggagcttttccagatcgcacagggggtggagcagccagtcccggagtttgcgtgcgcccatgggtgtgctcgtcctgtccagggtccccagcagggaaagcttcacgccgccgcgggaatccaccaggtccagattcctctggctggcctggtcaatcagcacggcgttctccgtggcgcgcacggaaatgcggcgcaagtggtccgtggggcggcggagctggtagcccagataatggagcaccgcgccggacgcccccagggcggcggtcatctccccgcagccgaagccgtccagggaatgcacccggaaatggctcagcaaattgggaatggccgtggaaggcagaaaagtatatccgtcgtaataaagcgtggggtgggttccggggaagcagtccgtctgctcgtcgctgaccaggagttcggagggattgatgcgggacagctcgtccagaagcaaatccatgtgttcgaactgggccacggaaaattcccccgtggtatggtccacgcatgccaggccgaagcgcttcttgtccctgtacaacgccacaatgtaattatggcgggaggaatccagcaaattcatgtccgccagggttccggcggaaatcacgcgggtcagttcccgctccaccagtttgccaggctgcggaatggtggtctgctccgcaatagccacccgcttacctcccttcaccagccgtccgatatacccttccgcgctgtggtggggcaccccgcacatcggaatgccgtggcgcttggtcagcgtcaggcccaaaatggcggaggcctccttggcgtcctcaaaaaacatttcgtaaaaatcccccagccggaaaaacagcagcacgtcttccggcaagcccttcttcatgcgaaggtactgatccatcatcggggttgaggcaggtccggaactactcataaataacggtgaaagagtaatccgattgcggcttcaaagcaaggttggaatccggtcaagacaggatgagaatatcctgcaaacacctatttcttgaaacaggattagttccttccccagctactccgccttactgcccctcttcagcaaatgcctgcgaagcgtcgccctctgaatccccagcagttcagcggcgcggctgatgctgccgcattgctgataaactctctcgcaatgccaggccgccacctcatccagccggacaggcatcactccgggaatatcctcaccccccgttttttcttctgttccgcgattctccaaataccggctcagcacatcccgccagtttccatgccccatgacgtcggcatatttcaaaaaattggacaactccctcacgtttcccggccaggaataagtcattaacacttcatccgcgccatcaggcaaagggacgccctttctccctctccacaaagcatccgctatttccgcaacatcctccatcatctccctgagaggaacggtcgtaaccgtaaattcctgaaggcgaaacagcaaatcttcacggaatgtcccttccttcgccattttccagagatttttattggtggcagtaatcaagcgcacatttacctctacctcgctggttccgcccagaggcagcaggcgcttctcttcaagaatgcgcagcagaacaccttgagactccaaaggcaaatccccgatttcatcaagaaacagggtaccgctgcaggccagctcaaaaacccccttcttatctccggaagctcccgtaaaagcacccttgcgataccccagaaaagttgcctccagcaacccgggattggacgaggcgcaattaaaagaaaggaaagtctgattccaacggggcgaattgagatgcaggtgcacagccacactctccttgcccgtcccggattcgccaagaatcatgacgcgtacgtcatccacgggagcggccttgataatcatctcttttaatcgttgaacagctctgctccttcccttgatctcccggtgcccatacaaccggaacaaatccatataacggcgcatggcggcagactcgcctcccgttctccggctcagcaaatcgtttaaatacagggccagaactttcctgccatgatcatcgcccgaccgcattacccggttgacaaatccggctgtttgggccaattccaacatccggccataatccggatcttcctgacgcccgactttcgccaggtatttcgccaactccccctgttttccccaaggggcgcacaagcgatacaccatctccgtaaagtaaaggtcgcagtcgcctattctttcttccagcaatccggacaaacaggccttttcctgttcccccatttcctggttgctcaaccataccacacgcactcccgaccttcccagcgactcgattttttccgccagcaatcggctgttcctgcccaggccaattcctaccagataaatgactccgggccgcttctcctgaagcagaactcccgccaacactcccgccagcccgttcatggaagaaaacctcaactccgtcccccttccttcctccttctctttcagcgccacaatcgcgcctccaagcaggcaatccgcatatccgtatccaacaataatcaatgattgttccctgctcatgacatcttcttcctaaaaccgttcctgtctgaatccgcatcccggtgcatgccggccgctttctcagacacccggagcttcctgcaaacaacttcatacggacaccccggaaagataaagcccttttcctgtccctctccccgtaaaaaacggcaattccagaggatagagaacgccgcggcacaacagcacgtttccatatcaaaagcggctatcttcatctttattcccattttcagatcttcagcaaataacgtgccatatgaaaacggttccgtttccgcaccaataaaggaacaaaaacgggacacgccggtcaatataaaaccaccgtctggtcaaaaataatccttcccttttaagccagccccccttcccggaatataacggcagccttctttgggctggcacactttttgctaaaaagaaaacgatgcgctttccctgcccaataaaacggctctcatcgcctcgttcctttccatcctccgttcctgtccagcaaaggatggagcctgcgagcgatttcacagggatcagcatccagcaaatggcaaatcaacaccacctccgtaaaagtaagatagcgttccccggcctcatatttggaaacaaacgtcctggtattgtccagcatcagagacagctggagctgggaatatcccttctcaaggcgcttttttctcaaaaacgctctcagagattcttcctgaacgctgttgcgatctctttgcatgataacattctagctgattttcataaaatcccccaaattaggggaataattcaacatgccgctcaaaacacgccgattgatgaaaaacaataactcgcagcacccccttcggaaaaactccgggaggaggaaacgcctcccggaggaacaagcctgggagtccctttccgagcatctgaaaaattccatcattgcctcggccaaggctttatccgcggaactggacgcggaaaaccacccgggaacgattgccattgatgcaaacaaacgccttgttcttctccccttccgggaaacgccggaaccggggatagaagaacattttgatcaagtctgcacgctggataaaccggaaaaaacgggaatcaaacgtaaccggcgctatattgtcgattggcacaagctgtttttcccctgcaaaaaagtcagtccgcttcgtaaaaaaatctttcgtgaacttttcaccgcctccggggaagaactatcctcccggaacatctttctcacgacaggaaaaggcggggaacatcaattcatggactatggagaaattgccgtagagttctttatctttgaccacagcagggaaaactcatccattcggtatttatccgccctggaacggtgcggagtcaacttgcacggcagataccatcatggcctgactctcttagccttcgccgccatgtccaaaaaatggggagccgtccgttacatgctccgggccggcgtcagggggggatatccccggcgccccttttgataagggcgacgcgttatccatgtacagggcctcattcctgcacatcctggctgagggcgactgcccgggcagactggcccgggaattcatgggaatgctgatgagcaaacacccggataccaacctggacgttcaacatcccgatacgggagcttctccgctgatggaagcctgtcaatccgggaatttagtcatagcccgggaacttatcagacatggggccgacgttaaccttccggacaaaaatgggcaaactccgttaatgtgctgttgcggggaaccggccacattccatgcctccctgacccaagcgggcgcgaatccctggcagcgtgacaaactgggccgctccgccattgttcatgaactggttgacgctccacatccttactcgggactcttcgccatgttatcccgctatcccgttatcccggaggagcagcaactcatcaccttgttcgccgccatgcacgccggatgggattgtctgggcatcctcgccgcagcgggcctgcgcctggatatgcaggcgcgctatcatggaagaacgctgcttcacgaactggcgagatgctcctccccctggatcttgatttcccttgatagcgaacaattcctgatgaacttctttcaaccggaggtcatggacgaaaggggaaataccccttttctggaagcctgccgctatggaaacttttatgccgcggaaaggcttctcaggctgggagcggatccgcttgcctgcaaccgggctggcctcaatgcctgggatgtgctggcggaagcgttggccgggatcaaacaacaaaaaagaaaaaagctgtgctcctctcgtttttcggatcttccgcaggaatatgggctgcgggaaccggaagaagtcccccaggatgatgacggcttgtatgaactggcccggctccttcacgcacactccatcccggcgcgccacccggaaaagaccatcgcccatatcctggcggccgcggaaagacatacgctggaaaacttccccttccgcaccctcacctatctatggttggaggcgggcttccccatggaaaaaccggaattgcagcaggacttcagttctttaattctccggcagcacgttatgtatgcaactcttagaaaatattcacttctcaaggacgaggccggcctccgggaacgcggcgagcgaatggcctccatcctctcctcctatcgccatgcgggaggcaaactcctgttcccggaaacaatggaaaggaaaatgcatctttggaaagaaataagcatgacggtgaagcccccgctggaggtaaggacctatccgcaacataatatcaaaaataaaaaagtaaaacacaattaaattccaacaaaatcccctgtttcgggagaacgcagacttgactttcattggagaaaatttatcataaaaaaactaaaaccattagatcaaaacaatgtgttcagaaaaaaatgtatggaaagttggttctaactggggaaacaacggagaatccattcttcatttgttcttaaattacggttgcgtcttttttggaggagcatcagacaatgcgaaaaaaggagattggcgtaaagtaaaaaagggggatcttctgatcattacagaaggagagacctcaatagccataggagaatgtctgagttcgttttcctcttacgaagaaagcaaaattcatttttgttcgaatgatcggaaatatattaatgagaacgatgtagttatctgcaaagccaacctctttttgttgcccgaaaagaatcgatttctggctaaatatggaaatgatacacaagaacatttttgtagacacgctaacgctgcaccagtgatcgaatcctggatggaattaaaaaatgaaagctccaaaaacagctttaagctggattgtaaaacagaagacctttccaaattattttccggagaagtccgctatcatgtccccatttaccaacgcccctattcatggggaaatggcgaattaagatccctgatagaaaatctatccgatgcctttaagaaacaggaacccgtattcatgggtacgatccagttttcggcgcctgttcttttagatcccgatggcaagaaacgttcttatgacatcatcgacggacaacaacgtctgaccacgtttcttattctccaatgtgttctggacgttttgacaggaaacgatttcaataaaaaattcaaaactatcctatatactcatgttaacagaggttccgctcaagaggatctggatgaattcttttctgatttaaaaagtgtaaaagatgtagaaagattgggtgaaaaaactcacaataaatattcacaaaacgcaaaagaactctaccgccttattgaggaattcttctcaaacaaagacgaatatgattccattcccaaagatacattaaataaattatcaaatttcatcacgaaaaatattcaattcatcgtcatcgaaacacacgcgaatctttcaaaaacgttaaaaatttttgatacaatcaacacaacagggcttgatcttggaacttctgacttgttcaaaatccgtttttacgattaccggacacatatctgcggagatgatgatgatattttcaatagaatctcagaaatttatcaatccatagacaatcgaaaaagggatcatccggagaagccttcatttagtatggatgatcttttatcgacttatcagcgtgtactcatcgcaaaaaacggccttgatagtgaagcatatcgtatgggacatcagattttctttgaacgactctttggtacgacccttcagacaaatccatataaagaatttaacaagtataaattttccctgaacaaaaatttgctcacattggatgatctcagaaaactgaatgcctgttatacaatttcatgtaatttaattgaggaaaatgaaacgtataaaatacttaatcattttatctggaaaactcgctatggaaagtttgttcatgattatgctattatcgctcttttctttgaacgaataactcctcaacaactacaaaatttcacagaaacactattcaaaatgctcataccgccaagtctgttctgggcaaaacaagttaacatggttattaaagatttgtacgatatattattgcgaatctcttctccttccggagctgatatatttttcgttctgaacgaatatacaaaaaaataccgagatttattcgaaaaggcctgcgatcaagaaatcgctggctacaatacatggaagcgtttagtttgcctcctgtgtgaatatctccagaatccggaaatctcctctgcacaacttttcaatcaaggaacagatatcgaacatattcaatgttttacagatcaagaagacccagaaaaaattaaaaatgaatggaaagaagagctaaacaggctcggcaatctggttctgctggaatccaatctgaataggtccatcaataacaagcataataaaaaagaggaatgctatagacaaagtgtctacaaaactgtacaggcactagcgcattgcgtttcctcctggaataaagaagctgctgaaaacaggagaagagaactcaccgacaaaatggcagcctatatattctccacaggaacaggacattaataattctttctgaaaagcaattcattaagagtcacagtgcctctgcccgctccgatcaataatttgccggggcgggcattttttatccatttcggaaacatatcttttgcctttcagcgtccgggctcccttcatttccaatacttccgcgctttccggaaaagctggcacgggatttgcccatagaagaatatcgttcaaaataacagagcccaatatgccggcaagctcaaatcccccaaaacaggggactttaatcttgacgcggaagaattgcaaaactatataacctccatatcaacttttacgtttcccaatgttcatcagattttaccggcgtattccccttattcccggaatcctctggctcaacatttccaagggaggattctctctgaccacaggaacaaccggacgcaaaataaccgtaaacaaacatggaatcagacttcatctgggctggcccagaacggaactgggcatcgggcatttcatctcctatgacgccatccagaaattgatcacgtcactcaaaaacaaataaacaacaccatcaccaccgcaactatggcaaacaaacaagaaacagactggatagccagaattatcagcgccattatttttgctattgcagtttacctcattttccggcctatttgttatctgttcaaatcctggaaaatccaaaaaggaaataaaacaatcatccaaaaccttcaccataacctgggagacttctggttaaccgaacaggaaaaacaacaattcctttttcacacggcccaatgcgatctggccgataaaaagattaaagaattttccagctattctctgcttgtccgtaaggacggtcaatacgacgaacgaaatcgagacggcaaagaagccaactactacgccgaacaaaaggataaatctgaaaagataatcaaacagctttcccgctcccctctgaaaaaatggaatcaattcaatgattccctgaaggaggaatacagtttgtgtacggccaatctcctcctgtgggcttatattccgttcctcctcgtcatccggcaatcagatgatggagcaggaatctttattctatccatgatctttctgggattgctgcagctgatcgtttacaagctcaccctctcgctcgtcaaaaatccggcctttccatttactccaaaacccggacaagtcactctggataacctgaacgaacatacccgcggggaaaaaaacaatcctgctccatttccggttcaacctcccgccgagcatctcgaattgcgcggagggtacatcttcggcagtctggccctcatcatctctctgcccctcgtcttcatgttcagccatcaatcccccggctcccctcaacagataagtgccctgcaaaacaaacaaaccaatttagagaaaggaatacggaacgactttcaaaaactggaaaaaatgcaaaaaacaatcatccggaaaaaagaatatcttctgacttctccctccctgcagcctgcgtcaaacacgaatatttccgctttttaacatgccgaaaatgaaaacagccaaacatatcaaatggatcttctggggcctgtttttcctgtccctggggattgccttaaccacaaccaaacaacacgcccccaggcggcagcatactctctccgggaaatatgagaagctggtaaaagaacgcagccatatccgatatttcataatgatgtcggatgccatcaattccgaattggacaacctgatcacaagagggaaaagatgcaccgggcgccatcttgacgaatatattcaaaaaaactgcatcactcccatttcctggaaaaatccctcttccccgcaattccacagccttgatgattttctaaaaagcgccgacgagctgcttcaatcagactagttctcttacatccgaaactcctgcctgcggattccagtggaaaccacattttaatcacttccagcatctttttcgccattgcttactaaaatcattgatgacgccgtctttattcgtcaacaacggtattgaaacggcatccatcaaggattggctgttccgtaatgattgaaaaggaaggctcaaagcgattgatcccgtcaacgccaaaagaaataatccaagaatttattatatcaacaatacctcaaaagcaatatgaaaaaaataatcatctcactcattgcatttactgcatctcttcttaatttaggatattcccaattcgcagttcattccataatagattcttcaggagcttattcattcaactattacgaaaataaaagttggtcagtatttccacataatttacttattgatcctaaaaataataaaaattgcacaatagtatctaaattatggggaatgggcgatgaatacaaaactatcaaaatcacttcagagtcaataaaagtaataataatgataacaaaagctaaaaccgatactagactgactcataaatatcaagcaaccatcaggattcctaaaattaattttactcttcctggagtatatattcatgcggttgaatataagaatgcaaataaaaaattaggagaatcgtatgctattggagtcacagaaaaatatggatctgatgatcttaatatgattttttctaaatatcctattgaaattatttgccctgcattgaaatatggcctgtgacggcagagccaactctaacttcaaaaacaaaaaaattaaaataaatataattcaatcaggattcaacctatgcacaacaaaagattgggatataatgaacttaatgttcattccacattaaaccatctggagagggaatttccatttggacgtcatccaataattatgcggggaattttctgataaaaaatattggctttccgcatccggcaaaaaattcccctccgccttattcattagaaaacgctaactgaaatgaaaccatacattaccattctattcattgcgatcgcatctctactgatgctgcaagcaacggacgcttcccaggaatccttcgactggaaagcggcattaaaagaagttgatccttccgattttgacaactatcagcagtattacgtggatttgatagccaatccatatacttacgaggtgacctgcaaatcaggtgaacgcgtcatcaagcattcctgtgcggcgttcggatatgactttgaaaataaaaatgaagtcattcttatcaaatctattgaaatggggaaatacgggaaattccattctattgattcaacaacaattccgctgaagagcattatttcgataaccagggcgaaacgccttcccgataaagaccgggagctcggattaaatgacgattacaaaaattatgacgatcccaatacatattatcaggaggtgctcgactccatcaatgaaagcgagctctaccggataaaagcccaaattgtcaacaaggagggaattaaagtaacgagagtgttttatgcttttgcctattgcaaatcctatgcgaatccggataaggcagccattttcctggatatcagcgatgactccgtcgaccaaaaagtggctgacagaatagggattcacatggtcattccaattgaagatattattgaaattcaatgtcaaatcgtaggcaatccttaaatgaacagataattttcccaaccaaaccatctggcagccccgttcttcaatgaagaaaacggaaaataaacagcgccccatccttctaccccgtatcaccagcctctcgtgtttccccgcaaagaaacacggctttccatctactctgatagaaaacatcctcaaaaagaggtacaaacataaaatacatactgattacaactatgagtgactattattgcgaatactgcggacgccgctattccagcgtccgggaactgaccggcaacaaatgcccccgccatccggaaggaacaaataaaggattccattccctttacgaaggttctgaaaaatccagctatgcctgcaagtactgcggcagaacctataaatccattcacgatatgtcccaaaatccctgctcccggaatccccagcggggcggctaccatctcccggccctttaactcttgaatcatctcccgtcgatgagagcaaaccaaccctgccagctgcccatccaccgggccggttctcttttgagaagctctcgtatagactggcaccgccataaaacagcccctattcaggacatactgaaatctccggattttctggcggcagataagaagctccccctggctctggggatagatgacaacgggcatcctgtcatcggcgatctggccgtcatgccgcacctgctggtagccggagccatcggaaacggcaagtccatgtgcatgaacagcatcatatcttccatgctcatgaagtttcgccctgatgaactgaagctcatcctgatagatccgaaaatgatgaacatgccgctttactccagactgccccatttgatggcgcccgtggtaacggatcccgggaaagttccgcgcgtcctgcgctggtgcgtaaatgagatgaagcgccgctactactgcttcgccaaaacaggcgtacgcaactttgatgccttcaacaaacgtccgccggacgtacctgcgagaaaggaggaagaacaggaaaacagagccatccctgaacgcttcccctacctcgtcatcatcattgacgaactcgcgaatttgatgcaaccggcgagccaggatatggaaacggacatcggcatcctgacccggggagcgcgtgccgccggcatccacctcattacagcgacacagacgcccaaaaagcaggtggtaacgaggacgatcaaggccaatattccgacgcgcatcgccttccaggtggcaagcggtacggatagccgcgtgattctggacaggcaaggagcggaaaaactggtgggcaagggagaccttctgtatttgccgccgggttccgcccaggtaaagcgagtgcagggtgcttttatctctgacgtcgcagtgaaagccctggtggcccactgcgcttcccaggccaggcaggaattcgatgaaggccttcagaaatccctggataacccttccccggaaacctcggacacacccgcctgatggcgcagctcttccccgccccggtattccttcgcagacaatactacagggccgcgtccggaaaaattccggcgcggccccaaatttcaggcatggaaagacaggttaatactccaccacgggggcatccttccacagggtgtccataccgtagaattcgcgcgtttcctgccccatgatgtgaaccatcacgtcaatgtagtccactacggaccacaatgccacaggcgtatcttccacataggtggggagggctcccgccttttcccggacggcttcttccagctcccggatgacggcgcgcagatggggaacggacaaccccgtgcacactaccatgaaatccgtcagggaagacatgccccgcaagtcgtacacccgcacattttcagccttggcgtcatccgcggcgcgggcgcacatcctggccagttccatcgcatcattggctaccatattcgattcgtttctattgaattatttcttttctcctccgtccatgccggattcatcagcaggagtgcaggaggaaggatcacgctccgcctgttcctgcttctcttcctccttccgttcttcagcgccgtccgcgcaggtctcttcagtttctttcttctcggtatgaccggaatcatccttcccaggctgttcctccacttcggaaggcatggggggcggagtcaccctggcgggaggatttttcatttccccgtattccagaatatccatgacctgggaaccttccagcgtttcaaactccatcagggcttccgtcaggatgtccagcttgtcccggttttccgtcaggatggccatggcgcgttcataagcgctgtccaccaggaaacggacttccgagtcaatcagttccgccgtggattcggaataattgcgggaacgcgttcccaggtcgcgggcaatataaacttctccctggtgttctccgtactcaatcagccccagtttttcgctcatgccgaattcgcacaccatgcgccgggccaggttggtggcgctcttgatgtctccggtagcgccgctggtcacatcgccaaaaacgatttgttcggcgcagcgcccgcccatcgccacgacgagctggtccagcatttcggaccggagctggtgcatcttgtcgtcggaaggaagccacatggtcatgccgagggccccgccgcggggaacaatggtcacccggtgcagcggctcgctgtgcggcgttttcaacaggcagatggcatgccccgcctcatgcacggcggtaatgcggcgcccccgttcgttaatcgccaggctgcggcgttcacgcccccagctgaccttgtcgcgggcttcttccaattcggcctccgtaatctccttcagccccttgcgggcggccagcagggcggcttcattgaccaggttggccagctgggcaccggaaaagccggacgtgccgcgggcaatccgctcaaagctgactccgggcgccatcttcacttttctggcatgcacctgcaggatctgttcgcgcccccggacgtccggcaggttcaccaccacctgccggtcgaagcggccgggacgcagcagagccggatccagaatgtccgcacggttggtggcggcaatgacgattacattggagttgttttcaaaaccgtccatctccaccagcagggcgttcagcgtttgttcccgctcgtcattgccgccgcccatgccgtaaccgcgctggcggcccacggcgtcaatttcatcaatgaaaatcaggctgggagccgtccttttggcctgttcaaacatatcgcggacgcggctcgcgcccacccccacgaacatttccacaaagtccgagccgctgatggaatagaaggaagcgttggactccccggcaatggcacgcgccaacagagttttgcccgtaccgggcgccccgaccatcagcacgccgcggggaatggtagcgcccaggtcgcggaatttttccggattgcgcaggaactccaccagttcccacacttcttccttggcttcgctgatgccggccacatccttgaacgtcaccttgtttttgtccggggaaatgaggcgcgcccggcttttgccgaagctcatggccccccgggccccgccgctctgcgcgcggaacatgaaaaacagaatcaccagaatgagcacgatgggcagcagattcagcaggatgccgccccaggaaccggattcacgcttgaacttcgtatccggccccagcagctgcttgacgcggtctccctggaactccagggtaaaaggcacttccacgcgttcaaaacgctgtttgtccacggaggcgtctcccgtagccgcgggccagatgcgggtgacaatctgtccgaccagcacattctggttgccgtcttccgccaggatgatgccgtcctttcctccggcaatgcggccttccagggccaggcggttgaattcaggcacggaaagcttctgagctccctcaggaatgagggaaacattctttccctcttccgtccggtacgggctctccaccaccctgtagccggaaagttcattcagcaaaggcttgtcgcggtccggaagggacatggaataagtcagcgcaaagggggtcatttccaccttcggctgaatttccttcctgtacaccagcgcgtgaataacgccttcggaaccgttctcgcttagcaccacttccacgggggccttgggatcgttcagcaccacgcgccccgccttatactgggcttcaaaggattccagattttccttgcgggggcccagcccgaaagattcaggggtgaaaaagccaaacgcaaggacgcctacaatgagaagtaccatgacccacacgccccagttgggggattcgggcctgccggagccgggaaatttgggaggacggggaggactgggtggcattctgtcagacataatgtggttagcacacagaagttaatgaatagggcggcatgatacgcgagtccttgtaaaataaaacttttttccgagacatgccagacagccgccgcaggacgggcccgcaccgttccgggccggggctcttcccggcaataaggccttaaccggcgcaggcctcattcccgctttctttttctgcgccgcccctcatggttcgcgctttctccgttcatgcgctgccggagacgccgcttccactggggcatcctttcttccgccggagccgcacgggaaccggcattttcccggctcttttcctgccaggccccctcctcctgcgcgttcagccgctcccgccgcctctgctcctggatttccgccaattttctggcgcggcggatttccacccgcttgctcacctccccgtgggcggaggtcacgcgccaggggccgatgcggcggggataggtaatgggcgcgcaaaccagttccgcatccagaaaacgcatggaccccaccagcaggttcttgacattcgccagcaggccgccgtccgtccagacgccgcccatgcccatttccagcaaaaaggccagatgaagcgtttccgcccccgaggcctgaatggaaaaatccctcagggaaatgccctccgccggctcctcgtccggagcggccacggaagcggcccggaggaggaacatcgtatcccggaccttgcggctcagggcacagaccagttcccccactttgggccgggcgtcaaaacggtaatccttcacttccaccagccacagatcccggcgttccggatgatacagcagaaaatccatttccttgcatcccccgcagaaattctgcgcctgccgggcataataatccgaacattcaatgcggcacaccacgtagccttcatcgatccagaaacggtggacgccctccacgtaataagcttttgacggcttatgactcataactcagcttcaaatacctgtccgcctgttcgatttccgcttcaagagactcgataggccccacgtcctccagggattccccccaggacacccttaccccggaacgttccccccgcggcacgctcatcccgaaaaactttctctgcaccatggcattgcggggttcggaaagctgaatcatcagttcccgcagcaggaacaggctgtgggaggacaacataacctgcacccccgtcttggcaagccccgtcagggttttcaccagcacgggcaggtgggaggcgttcagattcatttccggttcatcccaaaacaggacggaaccttttttcacggaaccgttccggatcaggtagctcagcgttcccagccttttgaatccttccgccaccaggctcatttctatcggctgctgtccgggacgctgcaaaaagaaccgcccgtcacgcttcaccaccttccccccgatgattttttccagcctggcaaccacgcgcccggcatccgtactgatgggctccgcttccgcctccatgtccagataacggcagaggtcccagctgccgccgtccagaaattcggggaatctgcttcccacctgcacaaaactcggataaatggtcagaacctcccgcgccgccaggaacaccaccggcacgttcagaaaacgccggggcatttcccggatgctcagcccctcctcttcatgccccgcctggaaatcaaacaccaggttccccatgccctccggcacgccgtccccctccatggaggcctccacgcgcgcatgggcgtttccccggttccgggccgtcagcccggccagcccgcgggacgcaaacacccgcatcaggtcttttctgagccgctgttcctccgcccatttctccggcagggattttctccccccgtcagcgctccacttggccacggtatagcataatttcagcaaatggcttttgccggaatcattgcctcccaccaccacattgattcccggaacaaactcaaaatgctctctcccgggaaacaccgtcacgccgctcaccagtaggtcatgtatcataccgttcccaatgtagcacagaagcgcaggccgtaaatgacaaaagccgccagcttccggccaccggggagcctgccggaaaacaccggaaacaacggggaaaacgcctgcggccgcaacgccgccccatcccccgcaggttccggacatacccggaaggcggcgcattttaggcttcccattgccgggagccttattaaagtaatccgtatgagcgcacaatggaccaccgccagggaatacacggacatcaagtatgaaacaacggacaacggcagcatcgcaaaaatcacgatcaaccgcccccacgtccgcaatgcgttccgtcccctgaccgtgcatgaaatgctcaacgccctgaacgccgcccatgaagaccccagggtgggcgtggtcatcctgaccggagaaggcccggacgctttctgctccggaggcgaccagaaagtgcgcggaaatgccggctacatcggtgaagacggcgtgccgcgcctgaacattctggacgtgcagcgcaccatccgcaccatgcccaagcccgtcgtcgccatggtggccggatacgccatcggcggaggtcacgtcctccacgtcgtctgcgacctcaccattgccgcggacaacgccaaattcggacagacagggcccaaagtgggctcttttgacggaggcctcggctcctcctacctggcgcgcatcgtgggccagaaaaaagcgcgggaaatctggtacctgtgcaggcagtacgatgcccggcaggcgctggacatgggcctggtcaacaccgtggttcccctggaggacctggaggaggaaacgctctcctggtgccgccagatgctccgccacagccctctggccctgcgctgcctgaaggcatccctgaacgccgactgcgacgggcagatgggcctgctggacctggccggcaacgccaccctgctctattatatgagcgaggaagcgaaggaaggcaaaaacgccttcgttgaaaaacgcgctccggatttttccaaattccccagacttccgtaacctccccctcctccgcaccatggcacccagctccgacaatgaaggcgccccccggaacggcaccgccggcagggaatccctgcgcgacctgccggaacatgaaaacatcgtggagcatttctacgatccggaagatcagggctcccgggaaaaacccgtccgtgaaaaaacgcctttctccctgataggcaatctcatcttcctgctgaccatagccattctggccgctattgcctggctggtttactcctcctggtgcccgcagaaaacggacgacctgcccggcttccgccaaagggaaaacgccccggatatccccagaatcctgaaacaggccatcaacagggacgcctccgtctcgttctcggaagaagacatcaaccgctacctggcttcctccatccatccccagcagcacggcgccctggccatcttcgccaccaacccggcggccggcatccgtctgcacggcggcaaggaacggccggacggaaccatcggggaaggatacatggaaatcatcatcgaacgctatacgggcatcgactcccgccagacgatttccctgttcctgacgcccttccaatccctggacccgcacaattacatggcggtgcagacccgcttcgaattctacaatgacgaaacgctgccgggaggaatccacgtggggggcaccatcggcagcctttccgttccccagggttacatgatttttctcctgcccgcgtttgaaaacctgctccaggcctacctgccgcttatccacatgattgaagaaagcggcatgggcatccatatcagtgaaggcaggctgaacctgacgcctccgcaaaagcgcacgctgtagcggaagaccgcagggccttccgcaatcaccggatgccctgccgggcaatgcccccttccggccccggcattcaatttttctccagatccctgaccatcaaagtcatatactcctcaggccaggaatgggtaatctgacccgcatcattgaaaaccgccaccaggcggatggaatccctcccatctgaaagcaccagcacggtttcatccttttcaaaatcataacggggcttgcccaatttgaatgccgcactcctgcggtccgtcctcagccacgcgcgcgcctgctccatcgtcaggccacgcagcgcccgggcatccctgaaaacgcgccgcgccgcattcatcgccgcagggctggaaaccaccatgccgtcccggaacgggcgggttccccacatgcggtcaatatcccggtccagcgcgccgcccatccccccggaaaggaaaaacacggctgcgggccaagccaggaaaatacccgcagcccatattgccagccgtttgcggcttctggaaagagccgctattccctgggctattttcccccatttttccaccagttcccggtccgcatgcccgaacaggaaattcacctgcctgcgttctatgccgccccgcagttcagccaccgtctttcccttttcgggcgccagatcctccagcgtggggcttccttccacgaagtggcggaaaatcctgggccacagcacgggaataaccgcaaaccggattgcaagcaaaaccaggctgcccaccaggcagccgcttatcaacagaatgtcaaacgaacggctgaaaaaatagtccggattccacatccagataaaaggagccgccagatacatccccagggaaaacaggcaccatgaccagactatggcggaaaaacggctggccgccacaaccacccccagcaggaacaaaaaggcccccagggcaattccccacggaaacgccccgtaaatggcggccggaaaagccagaatcatcaatgccatacccgcgggctgccgaactttttgcatatccggaacatagcacaagcccttgaaagcatcaagaaaggaagcccccgcagtcacacagggcctgttcatcctcccccgccttatttcagccagccatattccatgatgagggccgcttccacctccgcattcttggaagcctcattatccaggtcagcatacattttcctgatatccttcctctgttccagatattcatctccggaaacggataatctggactccttgaacgcaatttccttcatcagcaccccctgccagagctcaaacctcctgcggctctccagcaacgcggctatcttgatgcgccgccgctgcagttccatcaccacttcgcgctgcagcagttcgtggctttctttggccgacttatactggaaccaggatgtcaggcgcgtatccagctcttcccgcaggctcatgttcaccttcatatcgcccgctcccgcaaaaaaaccgccgtacgtcccgcccgtgctggaaaacagggttgggctgtaaaaattaatatccacggacgggaagaacttcaatttggcattcaacacctggaggcgggaagcttccagctccatggccaccatcgtcaccaccagcagatccaactggcgggacgccgccctgtacctgccccagtccagcctgggcatcgtttcaggtttcaccagccaccgggcgtccatattccccagcagcacggcaaaaccctgggaaatctcattcaaattccgttcccgttccaggtccagcttctttttctggacgccatcatcgtcataaggcagggagctcagctggttattgtagctgatctgcgcattccggtaggaaagcacctgctggtacaatctggccaccagctccctttttttcatctccagcgtcttttccgccgtataaacagccgccttggcggaataataatcgaacgggatctgggtgagggacggcatgttgaacaggatgttcgtgttgtattccacatcgctggccgtcaccttggccaggtcgctcaattccttggtcagcatccaatccagattgacgccggggattatctgggtaaaaacattgatgacggaacgtttcgtcgtcttgagggactgctccgattttttcaagtcgatgttccgctccatcatcatcgccagggcctggtgccatgaaatttccttccgcggcagctgccgccaatcgggaacggcatccatcctggccatcaattcccccgcctttttttccatgtgcctgtccacggagcaggaggcgcataccgtcgcacagaggcagaagcacaacgcagtcctcagccatgccctttcaaacagggaaaacaggaaagaacggacaacaggaggaaacgggaacatacaggccccttgttacatagcttctgcccttgaaaagtcaagcatcaacacggcaggcggagaaagaaggaaaaaagaagtcctggagcgcagggaattcggtttttcctttccccgtgtaaaaaatacctccctcctgattcctatcttgacaaatcatgtgtgatatcacagtttatcggaaaattattatccttttatgatgcgtcctttttttacctctttgtccgcggcctgctgctccctcggcattcttacgctggcccaatgcggcggaagcagttccgatgccgaaggccttgcgccctccaccatcggcagcaaagtgttaaacatgcaggtaacaggcattacggatgccgccataacgcttcccgccatttttgacatgaccaccggtgacaacggggtgttcatcatccagacgcaaggggaagacatgaacatgtggaacggggcaggcatttattcctacaccaaaaccgggagaaacaccgcggaactgagtctgagctacaacagaaacaacggttcatcctcggaacccaacaccctcatgagcaccatccggattccccagttaacctttgagaacgccacccacgcttcttccggggaaggcggcgccagcgtttcctatatgagagcgcaagatagagaaatcgtccctatcgacggcatcaccatcagcgtcaacattatatcccagtcataaataaattctttcctttatccatcaaatcatgaattcccgcctttacattcccgctttaattactctcgggcttgggatcctctccggctgcggcggatccagttccagcgaacaggcctatcttcccaccggccttcagcgcacgttggacattactcttccgaacggtcagccttacgtcttctcgttcatcatcgcctcagaaagtaccgctactatctacaccggaaccagtccgaccgcctcaacggcatccattcatgtcgtcaactacaagccttcctctgattctgcggaacaaataggcttttactggtcgtccaatgacggggaaacaaccaacaatctgaacgcccttgtcgtcctgtataatcccgacaacatttccaaaggcctcggttcagccacttgcagtgtcaaagacgccgaatatccctcaacgataacccagcaggataactgccaagctgtcatcagggacttcataacacccaattccagttcccaataggccccttttttcgcacctcccttcccgctcccattgtgggaagggatttttttaccctgatctctcctgccggaataaaatccaccttttccccaaaccggcaaaggcgggccggacggaacgcaaacaaaaccgggagcagccccaaagctccatcacttacttgagcactttccctatggggcggcaggcggaaaaggcgaccggaatggaggaaagcagaacacaccccgccagggaaatccccagcagccacaaatcctgccgtatatcggcataagtcaggacggagtttcccagcttaaagaattcccccaatacgattttctgggttttcatgaacgcccagacggctcccgcaaaggaaacgccaatcagaaacgcgttttccacgataaacgccataatcagcagtacagggcgcaccccgaagctcttcatcagcgtatagacatattcattctgacggaattccatggatgccagggctgtaagcagaatgccgacgatcaccgcaatgccgagggaaaaacccgtcctgcactccgtctggttgcccatcagcacttccagcctgtcaagcagccctacgtgagtctgaaccatggtcatgctgccgtcataacgcaccatgttgttcagcacttcttctatgctccgaatgcgggccgccgtcatttcatgcacccggatgatgtagcggcaattttccacgggaacctcctgtccggaactgaaggttccttccggggccaaaatgactccggaaggatacagcctgcccagcaaatgcccctccggcagaggggaggcattcagggaaaaatcaaaatccgctatggtaaccgtacaaggccccgcctgcaacgggctccgggaggggttgtacaggaggacggtagccacatcctccaacccaagcgcggaaagaaaggaacaggactccatgttgtattccaggatggggaatactgtcttgcccacgcgcgccacgcccgcacgggcatcattcagcaccaggacgtcgcagccatacagggaaggcagttcatgctgcagcagatttttcttggaagggtcctcgtcgcgcactgtatcaaaaacaataatcaggtccgccccgttcttcctgatttcatcatgcagcattttggcggagaggacataattggcaagaaaagagagcgcgcacagggaaaggaagaaggccaccagaatccgtgaaagggggctggccgggcgttccttccaacggtggagagtatctttaaagagatacagacaggttaaaatcaatgatttcatgggtcaggtcaaacagccgggaatcatgcgtgctcaaaatgcaaattttgtcagcagggtactccttgatcaaatttttaatgatttccgtattgccgtcatccaggccggaagtaggttcgtccagcagcagcacatcggaatccttcatcatcgtgcgggcaagagccgcccgctgggcctggccgccggacaagctccccgcctttttatgcctcagagattccaggcccaggcgggtaatcaaatcatccgccctccgcgtccactgctttttaggcagcatggccatttccgcgcacaattgaaggtttctctccaccgtagcgaggggaaggagattgagcccctggaacatgtaactcacctccttgcgccggtagagggaatccgcctgaaccttccggcggggggtaatcacgcgcccgctctgcggcttcagataccccgccagaatttttaacagagtcgttttcccgcatccggaataccctttcaaaatggtgattccggaggtgaacactctgttataatcttcaaaaatccactgcttgcctgaataactgaaacagactgattcgcacagcaatttcatttttttcgaacgatcaattccgtttccccattcaccaccagctccaggtccggatgcactttttcaagaagttcctgccaggacgaacattttttcccttccggcagggaagccagcctcaccttgttgagatgaaacacttctccctgcggcatgtaataaagacgggccgtgcagttggaacccagcatcgaatgggcgcgcgcatgctcctgacggggcagacggaaaaaatacgccagcaattccccgccgccggaaacattcttctccacccgcttgaaggcaaactcccccttcagggcggaaccgtcgcccagagggacggacagggaaagggattccggcggcagattcgtcaaatcagggtccgaaatggaaatggtcagataataagaggagtcatcgcacacggtcgcaatcggggacgcggcatccatgtacagggctacgctgttatccggaggaatggaaaactggtactgcagctttccgtcaaaaggcattctgaggatatatttttcctccttcttgcgaaaatccagacgcggcttgtcctccaccagggacaactcctttttggaaagctcaatcttgtctttcaatgcccggatggccctttccccgccttccgcctgcttgctggcatattgccgttccaccctcgtcagggaagagtaaaactctatctcttcaagctgtttttccagctttgacaactcttcctccttagcgatacggtccttcagaatttttacttccagctccttgcgctccagttcaatttcatcttcattgactgttgcaataatagtatccttctgaacgcgcccgtccgcgggaatccagttgctgacaattccatccgccggcatgacaaaggagcgcagcctttccgggacgatcttggcgcggaaagtcttgataaagcaggcatcttccgatgccgccataccagtccccccgccggccgattccgcattccagacacaaagagccagccccgagcacagccagatgccccaaagacatttctttgcccttccgaccataatttcaaacagtcctgcccccgtttcacggcagcgaagccccgtcataaatgatcagaacttcaggataccgtgtaactcaccgttccttccgtagcggtccagtcctgcgcttcttcaaccgccttcatcatttaaaacgggaacctggtaagtgatggaaccggtaaacgttccgccgcagctctcacgttcattggaggagttgaaggaaatattagcatctataaaggccttgtccctgtttgtcacgacaatcgggcccggagccgtccactgcccggaagtaatcgtgaaattccccctcagaatagcggatgatcccgtcctgcggtacactacggaagcaatattcataggagcgctttcactgctgcttgccgcgttaatgcttaccaggggcaaatccgaaccgttgcccgtcaatttgacgacaatgttccacggcccaaccccgccttccgtggaaagagaagctgtcaagtccagcatggcgccggaaggaaggctttccccgtcaccgctgctgccgctgcctccgcaggaaaaaagtccaagggtcaaagctgccgcggaaagggaagataatacgcacctgttcgtcaatcgggaaaacataaagaaaaagattttcttcaaggatagtgattccgtccggcgcgtcaacacataaataaaagaatatttggaggggccttccgttttttcgcgggatgcaccggggcttacggtcctctgccattccccggacgcgcgccggattttccgctttgcggcggaaaatccagacgccaatccccgcaggcagcaaacgtcatccggccctttccagcctgcgcttgaggacgcggcccgtgaccagcaggggggcagcccccatcaggaacaggaacagggaatccttccatggggtggggaccgttccgtcatccgcgctgtatccggaatccaccggggacaggccggagcctccccagggcagaggctggcggcgggccaggaaaatttccggcctgtccagggcatcccggctgacgcgctggatttcggcagattcatccagcattacaacacggtcattgacatagaaggatttgacggacggacggcccttgcccaggagttccaattccgcaatagtccgcctgtagcttttttccgaaccgccaagggcggccctcctcacctgccggacagcggctttggcctgttccggcccctccgctccaatagcggcaatgtggagcagcgccatcttgagcagcttgaattcttcaaattccctgtcgtccagatgagggcgttccttcaggtcgtccactttctcctggatggtttcacgctccctctcccatacatttttggacgcctggtccaccaccatcgtttcaaaagagtagcgcaaagggcagaattccgccaccagcggcacacgccccggcttaagacgcccgtgttcatccgtacggtgggcggaccatgggatgaactggttcatttcatcaaagcggacaatggctccggccatcaatatctggggaatcagaagcagaggcaccatgttaagcgccgccctctccgtcctggcgaagacggaaaccagcagggacaggctcacgccgacaaaggccgtcagggtcatcgtccccaggtaaatcaggaacatttcatggatttccagaatggagttccccacccacaggaacagggcggactgcacggcggagagccccgtcagcaccagcgccttcgccagaacataaccggtcacgaataccttggcattgctctccctcttgagcagggcacggtccttgagcacttcgctggccgccccggtcaggccgaagaacatggccacaatggtcgccaggaacaggtaggaagggatgtggagggccgtggcaaacgtgtattccgggctggaagaggcgcgcagggtcacggaaatcagcagggccagcaccggcccttccagcagcatggtgtacagccccatacggctccgcacgcgccccaggaaggtgcgcacggcccagatgcggaaaagccgccagagctgtatgacgctgcgcctgggggcggggggaaattccagcgagccttcatacagcgttctgggggcgcccccttcatgatgatgccccatcacgttgcggaaccggtagccttcaaagcgctcctgccacaagcgggggtgctgccgcctgcggcggtcgtgccaggagaggggggcttccagcacctcaaatacgtagtccgcgcctccggccgtccgcgcctcctcggagacgtcaatggccatgtccgcagccgccttccggaaataccgcatcatgcccggcacgtccccccagtaagccatctgaccgccgtggtccagcaccagcactttgtggaactggttcagaatagccgtgctgggccggtgcatggtggcgattaccattttgtcgcggctcatgttctgcatggtctgcatgaccagcttggcatctgacgtggacaggccgctgataggttcgtccagcaggaaaacatccgcaatgcctgccaggtcaagccccaggttcaggcgcgttcgctccccgtcggaaatggtgcgggcgttcatctcacccacgcggcgggaggcaatgtgcgtcaggcccaggaatttcaaaatagcgttcacgcgcctgacgcgttccgaccggttcagccgcggacggcgtatcatggtggcctgagagatgtgctcggaaacgctcatggccgcatccagaatatcttcccggggaatgaaggcgatgtagggccggataagatccggggcgctgtacagaagctggttgttgtaacggatgcagccccgggtgggcggcagctggccggccagcatggagagcagcgtgcttttcccggatccgctgggccccaggatgcacaccatttccccgcgtttcacggccaggtcaatattgtccagcacgcgtccggagcgcaggaattccttggtcaccccttccacgctgagggttctgatcgcatggtattcttcatccagcaccccggcggaaaaacggcagcgcagcgcgtggtaggcattcaggtgcaccacgtccccatccctcagggaaacccttccccgaacaggccggccattgagcagcagaggcatggaggcctccaccacttccagccagccggaattggtggcgctggaaaaagaaacctccagcaccgctccgggggccagcccgggagtcagcagcatgtctcccttgcgcgccttttccggcaggttggtcacccgcagcttgcggtttccgggatccaggcggaaacggcgcccgatgtccgacatggaattctgcacctcccccatggagaaaggcccttccccgtccagcgtgaaggatgagtaataggccatgcgcacgctttcaccggggtacagccgtttcccgtcaaccgcgaattccacttccggcctcagcacctccacctcgcacgccagccccatgttcacgcgcacctcgctggcgcgggaacgcacccggctgatttgcagggagcctccgtccagggaaatatagcatacatcctgcttgcctgaacgcttgcaatccagaaaaaacgcaaagtcttcaaaactcagcggaccggacggcagaagcaccacctgcccgttggtcagcggcatcaccccgccgggctgcaaatggcgcccgcgcaccacaatgggacgggtgccgtcattcaccaccagcaccaagcgggaacaccggatcaggcggaaggaaatgcccttgtcctgctccgggagggatacctccgcaccgatgccggaggaaaaaccgacgctgtacgccggttcctgggcctccacgtccggtgtcatcagcagctgcctcaggtggtttgccgtgcccggcagttccagaccgtacgtcacctggtcaaacagatcccctgtcatgcgggcatctcccgtattgatcagcagggagagcacttccagagctatcgccatgcgttccgtctcatccctgccggaagctgcggaggccaggacatccgcaaccgtcaggctggccctcatggaccgctcaaaacggttagaaagccagcggtgctccacttccgggaaagtatagcgcagaatatccagagcggcgtccgcatcacgggcgctcaaatggcggcgtccgcttaaaatagtggcgaacaagtccaccagcgttccggcatgcaccttcatggagccgtcgtcacggcgcagccacggcacgtaggcgcccagcgtcctgaccagattcagcctccagtgaatcagcttggaaggaatgtcaaaaaaccattggatcatgcctggaaacgcgttgccggaaccagtagtacagggattcccgccccatctcaagcgcaaccggaatttcacggagaaatgacaatattttctacagctttatcttgcaataggtccggaggaagtatagttctgtccaatgttcatgctttccgcgtgaaagctagccaaatacatcaacattatcacaacatggatattttagtttctactctttgtgacttcgccgccgactaccagggcaagctctgcatccagggcggttttgactccctggttgcccgccagttcccagtcgtgcatcccgtctgcgccgttgccctgcgcatctgcctcactcctgaagacgaaggcacgcacgaactgggcctgagcatcgttgatgccgacggcacgccgctggacaaggaacgcatgcccatcaagatcaatttcccgattcccgctttcccggaaggagcctctttcttcacccgcaacctgatcatgaacttccagggcctgcgttttgaaaaaccgggcaactactccatcgacctgacggttgacggcgaactcgcctcccgcgtgcccttccgcgtagtgcaggtgcaggaagaagccgcccaggcctaagaaaccatcccctcttccatcaaaccgcctcccgttcatccggcaggcggttttttattggagcggccgtccgcccggaagtgcggaacaggccggccccggttccatgcacctgaaaacctctgcgcctggccccggcctaaaaaagggagaccggctttttgcgtcctccttccccctttttcattgcggttccgcaccggattgaccatgatacgggctgctccaacccgccatgcacaccgcacgcctccaatacgacaggattatcattacgggcgcatcatccggcttcggggaagcgtttgccggaacgctggccccccatacggaggaactggtgctcatcgcccggaatgaagccgccctgcgccagcttgccgccgccctggaaaaacgccattcaggccttcacgcctccgtccttccctgcgacctggcggacgaagcctccctgaatatgctcatttcccgcctggacagccttcctccgggaagaacccttctgattaacaacgccggtgccggtgattacggagattttgcggacggccgctgggaaaaaatacgttccttgctgcgtctgaacgtggaaagcctcacccgcctgtgccatgcgctggtcccctccatgaagaggaacggaggagatatcatcaacctcagctccctgggagccctcctgcccattccggattttgccgtttatgcggccaccaaggcttatgtttccagcctgtcggaagcgctgcggctggaactgcgcgaacacggcatacgcgtgctggccgtctgcccgggcccggtttccacgggtttcggaaaagcggcgcgccgccccggctttaccggaaacatgatgccggggcgcaacgcttttgacacgtccgttgaaaccgtcgtgaaagacagcctccgtgccctggcccgcggacgcgcccgggtctttcccggcatgaaaatacgactggccgccatgctgctggccgccgcccctctggggctgatacgccttttcatgggcaggcgcccccggaaagtcctgccggcatccaatgattctccttcttcagcatcatgaaagcgcaccgccgcagaataccccgcctcacctggttcaagctcgcagtctgcctctgcctggcagccatggcagcctccctgttcacgccgtaccccgcccagatcatacgcgccctgaaaggggcgccggaacaggcgccgccggattccggaacctgtccgccccaggaatccccccccgcggaacaacccgggcaggaagaacagccaataaccgctgcaccatccgcctccggaaaggaacccggggatgaacggctgtacactccatggacgccggagcgcacaatcgccctccccccggtgcagtaccccccatttccccccgtgcttcccacaaggcctgcggaaggggccatgacccatatttatgaactggcccgcggcctgaacctgaaaacgcaggttaatttccagcccggcaccctggcctccagggacagggaaaccaaaagcaattaccagatgaccctttccctgaacgtcaaacagcccaaagcattgacgaaaaaggaagatatgctgaagctcaatccgaaactggaacccatgcttcccggcctgtccaccctgttcaggcatgcgcgcgtctccccttactacgggcaaatttacgtccgcaaacagacggaaatccgtaaaaacctggcctccctgctcaaacttctggaccgccataattattacgatacggagaccattctggaaaccgcctatccggacacgggaaggaagcttctctggctgcaaagtgaaatggatgttgtttccgacggctcggacggggaccggctggccgccatgccggataaaatcctgaaaagctccttctatcagcccagcacttcctaccgctggaaaaagcgcacagacaagcccaatcccctgctcaacccctggcagcagaggctggcctcctacaagaagacgctggaaaaagcccccgccgcggaaaaaacggctctgcgccgcaaaatagaccatgcggaacgggtcattgaggaactgaagcggtacagcttcctgatctcggaatacgatccgttcatcgtggtaccgctgggagtcgtcaaccagtcctctcccttctccccgcagttcggggactatgccgtcgtcatcgtgggagacaagttgtacccggccctggtgggagacgccgggccgcgctacaaaactggggaggggtccctgcgcctgagccgtgaaatcaaccccaaggcgggcccttacagccgccccgtctccgacctgaaggtaagttacctgattttccccggttccgcagagcctgaggccggcccacccgactatgaaaaacttacggacagatgccgggaacttctcaacgaaataggcggcatggggaaaggattcaaactccaccaatgggaagacctgctggcgcccaagccgccgcccgccccaaaaccggaaagcggcggcacagcggaaacatccgcggataagtggaaaaaggaggaagcccccgggaacaagcccgcgccggccccggcttccccgcaaactgcaccggcttcatcagccgcaaaaagcgccgcataagctacagagcctccttccaggaaaaaagaaaggctttccacatccggaaataaacgtctccgcgcgcaatcttcaccttcccggaagacggatgccgccgatccgcccgctggagcaattccagcgtgtccagccccagccaggcgggcaggacagtggaaaaacgcagccgcccgttccgcagagattccgcataaaacaccccttccttcagccagcgttccgcacggtccagccatggacggtcatcgggggcaggcaagtagcttcttccgcgggcgaggtcttcctcccggtcacgcagaatattcaccaactgcagccccatgccgtagtgcctgccccagcgcaaaagctgctcctccggctgcgtgctaaagcccggcccctgagccagcaaacccagcctggtccagaattcccctacgcagccggccaccatgtaagtataatgttccagctgttccggacatgagacggcagcatggctttcaaaatacatcaaatcccacgcctgtccctccacgatggaggccagcacctgccgcaccagcatccgttcatgcggggaaaggttttccagcagcgccaggcattcggggaaacgggccagcaattccgcctccccccggtgcgtctggattgtggaaagaacgcccagacggccaaaacaggtggcggcgacctcccgggaggcggcgccggccaccgtctcccccatcatcctcaaaagcgccaggcgctcccggcaatccatatccacggcatccgccaccgtatccgtggcacgcgccagcagatagcccacggccacgccggagcgcatttcccggggcaggaagcgcatgctcagataaaaggaccgggagacggccgatagaagatggtcaaggcctttcatgatttctgcaggcccagcctgtgcatcttataatggagtactcgcggggaaatgcccagttcccgggccgcggcggacatattgcccggagaacgtttcaatgcggctacaatcaattcccgttcaaaggaatctaccatggtcggcaaatcggcaggagcctccccgtcacgggaataagggacgtcatggctgggcatctggagggaggcgggaaggttgtaaccgtaaatgcagtcgtcctgcgccgtaatgacggcacgttccatgcagttttccagctcccggacgttgccgggccagtggtaagccatgagcatgttgatggcgggagtggacagccgtttgatatcctttccgtatttcaggttgaacttggaaagaaaatgttccgccagcagcatgacgtcccccttgcgtttggagaggtccggcataacgatggggaaaatgttcaaccggtaatacaagtcttcccggaacttgttcgccgccatcaattcctccagattgcggctggtggcggcgatgaagcgcacgtctgcatgaagctccctgttgcttcccacgcgggaaaaggttttttcctgaagaaagcgcagcagcttcacctgcatctgaaggcttaaatccccgatttcatccagaaacagggtgccgccgtccgccgcctccgcccggccgatgcggcggctggtggccccggtaaaagaacccttttcatgaccgaacagctcgctttccagcaggttctccggcatggccgcacaattcagcgtgaccagcggcttatcctttctgccgctcagattcaccacggcgcgcgccaccagttccttccccgttccggaacttccccgtatcagcaccgtggcatcgctgggcgccacctggcggatctgttcatacacctggagcatagtgctgcaattgccaatcaattcgcccggattagtcgtcaaaagctcccgcagtttttcattttccgcaaccagggcggcatgttcctcatgcgcctggaggctggcagccagagcatccccaacaatattgcctacaatctccagcagtttctgatcccgctccaagtcggtgtcccggtccacggcacggtcaatgctcaacgtgccgatgacctgctgcaaatgaatgatgggaacgcagatgaaggctactttttcaccgcttttgcgcgtgcgggtacggttcaggaacctggaatcccgagaaatatcctcaatcacatggggcctgcccgtttctgccacatgccccgtaatgccttcccccacatggtaatggccgcgtttcatttcctgctcgtccaggccgtgggaagcttcaatcatcaaatcgttcccgcggcggatggtgaacgtgccgcgcagcattttcatgcggcggtaaagcacatccagaatatgccggagcaaagccgtgccgttgcgttcattgacaatggcggagctgatttctttcagcacgaccatctccaaatccggtgacctgtttatttcattcatgcaatccggggctgggcgaatattaaccgcacgcccccgccataccaactactttttcttccaccgccatgcagccgggcaaaaaaacggtacggggaatatggataacatcccagcaattaattttgatgatattacgaacggggaacaaaagatttttacaaaaatgtaatatacatcccttgtttcgttccgttttacatgcccacgtctccgccggactcccgtttcatcatctccgtgataacctggaacaacgcgttgcggtacagcacgccgtccagccgaccggtattcttccaggccacgggaaaggctggcagatgggtttgttcaaacagcttcaaggcatccgtcagatgggtgccggcgtccagcacgggagcgcccgtacggaccagggacccggcatcggccggggccgcccccttccgctcctccatctgccggcgaaccgccagaaagtcctccggatagatggccccttcataagttccatccttattcaccacaaaaaccagatctccgggattccgcagcatcagggaagagacatcatccagggaagcatccggggccacctggggcaccacgtgccgcgccaggtcatgcacatggacttgcgccatgggcagactgacgacggacgccggactgccggccaggctggcggcatacatggaacgcgcgcgaatcagttttcccgtgccataagcgcttacgacaccgatcagcaagggataaatcatctgtccgctcatggaaaactccaccaccatcaccagagccgtcaggggggcctgggcagctacggcgaaaaaggacgccatacccaccatcgcatacgccaccgtatggttgccctccattcccagagacgtcagaaccgtactgaagataaaacccaccatgctccccacgtacagggtgggcgtcatggctccccccaccgtgccgcagccgaacaccaccgccacggcagacaccttcaccagaagcaggacgagcgcctcccgcgtgccgtaatcctcatggaccagcccggtaatgagagcctgaccgttgcccaccacttccggataaaaaacggccagaatccccacgaccagcccggcggccgccaatcgcagcggcagaagggactggcggccattcaaatatctggcggccgcatccagcaaactgacccatcccctggccgccacggccgccgccgcccccagggcgatacaccagagagactgggaaaagacagtaaagctttcaaacggggaactgtacaaaggggagggatcccccagcagatgcagcatcacgaacccggtacaggaggcgataagcaggggggctagaatatccatgctcacggtgccgatgataatttcactcacgaacaggcagccggaaaaaggggcatggaacgccgtcgtgaatccggctgccgctccgcagccgaccagtagccggagccgcggaatggatacatgcagacgctgccccacggtagacgcaatcagggcggaagactggatgataggcccttccttgccgatggccgcgccggaagcgatgctccatgccgcggaaaaaactttcagggcggaggcccggaacttgatcagcccgttcccgatggacatggcctccatatattccgtagcctgccccggcatcctcttcttcaggaacagcagtatgcagccggccaccaggccgcccgccaccggaataaacatgcgccattccggctctaccagggaaaaggtgcctacgcgggaatccgaccagatgccggtgagcatccactggatcacttccaccatccactcgaaaaacagagacatgcaggagcccaccacgccgacgagcacggcccatacataagtaacctgcctttcccccaccttccaatgatggaacagttttaaaatccatccgtaccagacggaatccggcggctgggactggggggacggagaattcatggaaaagagggtaatactatttcattgtgacaaaaaaatacctccggctgttcgatacggaagaaaaaactgcccatccccatgcccctccggagccagcgaagattctcaacggatacgcagacggctcttaccagcccccttcggagcctggcccccgcgccggtagtcagaacgtatatttcaaattgacgccgtaatagaaatcatcccccagccccttttgctttaccacggtcagcgcctggctgtaattggtgaacaattccacagtcaggcgcccggtagcacggaaggtaacgctcagattataatccagagcattggaaccatggtgcaccaccgggcctacataccccccattgtaaccgtagcgcactacggcatccacccgcacgcaatcagctatttcttcatgcatccccgcaaatacggcgtaataaccgcgaaacgtatggttgttatattgccagtacaggtccgcgccgccaaaccagcggtcggaaaaatggtaggtcgtcttcaatccgggacgcgggattcccttatctcccggaaaaacaaagctgtgctcataccagggcatgaccgtccagttgcccagttccctgacgtagtccagccggtatttcagctccgcatgattccggtgctccgtggaaacgccgtaccatattttccccacccactctttatactgtatttcaggaataaacatgcagagagaaccgtcccacaaatccaagccctcgcactcgtatttgctggcccaccccgcctgaaatcgcaaataaacacgctcatccgcaggaccggccagggaaagggggtgggggcatgccgtcttcaggtggtaggactgttcttggcagaccgccgtcgcccaggctccgggacacgccagcatgccggtgcaggccgccagcgacaacagaattacggtattcatcttcatattggtcatggctggaaatttttctaaaacggcatatccggaggcgacgccatccacccatgcgtacccgcacaccgctttagccgtaaacggatactacgccctcacccggacaaagaccttctaaagatgagaccagcatgaaaaaacaatattcagttccaagagccaaaaaaacgaattccccatgaaagattgtgtcagcagtctttgtacttataaccgtgtccatgaaattcattatccccgcactcgccctgtccgccttccttcccgcagccttctcacaagaacaaatcatcccgaaaccggcggaaatcacattgttcacaggaagtccggcccgtctcacaccggattccctcatcatcacggaaacacaggacaagtctttcctggatcaggcagggcaattgcagcagatgctcagcgaagggacaggactcccccttccccttaaaccggccgggcaagcgtcgaaaaaagccgcctgcatcgtcatcaaaaaagacccaacccttgccgccagaggagaagaagcctactccatccaatcatccccaaacggaatcatcctttccgcagccgatgccaggggcatcttttacgcggggcaaagcctggtccagatgatgccctccgtcttccacgaccggacggcggataaatccgccgtccggtggaatatttctgaaactccgttccgcataacggactacccgcggttctcttggcgggcgctgatgattgatgaagcacgccacttctttggcgaaaaaaccattaaacagatcatcgaccaaatggctctgctgaaaatgaacatcctgcactggcacctgacggacgacacaggatggcgcattgaaatcaagaagtatccgcgcctgacctccattggctccaaacgcagagaatcagaaatcggcacatggaacagcggtaaatcagacggaacgccgcatgaaggcttttatacccaggcacagatcagagatatcgtacaatacgcagcccgccgaaacatcaccatcgttccggaaattgaaatgccgggccatgccagtgccgccgccgtagcataccccttcctgagcctgaaaactcccggggaagtgcccaccacattcatcgtcaatacggccttcgatcccacctcggaaaaaacttatgccttcctgtccgatgttttggatgaaatcacggcactcttccccggcagaatcatccacattggcggagatgaggtgcgctatgacaagcaatggaagggtgttccggaaattgaggaattcatgaaaaaaaacggcatgagaagttatgcggacgtccagatgcatttcaccaaccgcatgtccggcattattgcccaaaaagggcgcaacatgatgggatggaatgaaatttacggacatgacgtcaatggggacggaggaggaaaagccggcgccaaactggatacaaacgccgtcatccagttctggaagggcaacaccggcctggctaaaaacgctatccgggacggacacgacgttatcaattctctccacacctccacctatttggattacagctacggcagcattcccctgcaaaaggcatacgggttcgaacccgttttccccgggttggaggaacagtaccattccagagtcaagggactgggcgcccaagtatggacggaatggatttccacaccggaacgcctgcactaccaggcattcccccgtgcctgcgcctttgcggaagtcggctggactcccgccggtaaaaaggattttccggatttcaaaaaacgcttgaaagcgtatagcgagcgtatggagctgatggggatcaagtttgcccggaacgtcatcagccaaatagacaaatctgactttttcaatacgcccaggattggcacatggacgcctgccaccctgacccgggaggaacattcgtttgacgttaccaaactggtcaaagcgtccggcaaacacaccgtcaccctgctgtacgacaaaggtgcccacgccatcgaaatcgaatccgtagccctgtatgaaaatttccgggaaatctcccgggacgcccatgcaggcagaagcggcgcccataaggaaaatatccagtacattctgaatgccccggaacccaggcaaggagcaacctatactgtcaaagcaaaattcaaaggggacggaggccgggattcccacgggacagtgtattttgaaacgccataaaaacaccgtccccgtcctataccagaaacagcaggggcttcacacagaaccccctttactccgacaaacggagcacagcatccgcagactcatggttacggacacgagcctttcagcatcatcggcctcccaagggtgccggcatgtcttttcatagaggaagacgcccctttccatcaggtggcacgaaattgatactttaaaccacagaaaggcttaccctgaaatcagccttgccttaacaaggctccggaggtcgttgcttgcgaacctccggaacctgaacaaccgtgaatcggcgtaagatgattttcatccgggaaagccagacggaatttacatgttatcatctaccactttttccacatactggaaaaagatgcttccgtcctccccgctgattccatagtctctgacatcctcaatattcgcattcttgattcgggtaataatatagactttggagtacaaaatcccccattccccatactttttcttatcaaaccagatatggtggttatagtatggttcaaaatagatggtgcctccgtctatcggatcggaaatcgggccggaatatttgacaacaatatggctgattcccttgtaacaccattccctgccgcattgaggatttttggaaagggtggtgctcatttcaatggtggtgtccatgacatcataggacaacctatcctcatcatggtatttgattcctttttgaggcagattgaactgatttttgatgatgactccatcataaatgagacgtccccctttccattccgtcttctgcggcactgtttcccctttcaagagacagattcctgagagagaaaccattattgcacaggcaattttattcattgttattttctactttgttgttgtttcagcaattccttattgaggaattctttcatttcctgaacagttttttcaggaggggtcttcgcatcgtcccgatactgcctccagtcgatgcgcagcttggccatcaggcgcaattcgctgagagaaaaaggaacagtacccggggcattcggcatgaaatcccgggacctgttgccaatataataaatctggctctgctcccaagaacgcttcatggtctcatcgaaggaagctctcacacggtcgtcgcttactctggcttcccactggaggcagtccgccaggcaaccaccctcggcccgactcttccgggcctgccgccacagggaaagaatatacctgttctgaagactgcacgcagccggagtaaggtacttgcgcgtatactgcaactcatacagaggcttgcacacagccttttccctctgtcccagagtagctccactcaccctttccggagtggggacaataccggccagagcaccggatacgtaataaggcagttcctcaggcattcgaatttcccacggtattttttcattcacaaacacgccgtttaaaatggtattaaaggaaccgttccggcaaatacggaacaggtaaatcccccctttcctgctcatgaaccttttataaaccccggaccccgcaaatctggaaacgcgtgtgcgcgcctccaccgggtaggaataccactgctccatggatgcagcaagttccttcccccaattattctgttctcctatcgcaagatccccctcaatattgaactggaacacaaggggagcggtggaagggtgccttctggcttccaccacgtaatcccgcctggattcattggtgagataaccgttgggattgtaaaaatacagggctatttcatggacaccttccggcacctctacggctacccatatatcgggtccgtccacaaagcccggatacacttctccgtggtcatcccactccgcctctgtccgcacggaatccgtagggtcgaaaagaacgttgcggttatcattttccttgatgctgtgcacccaccagcgcaaagcgtcccctttcttgcggttgagccccatcagcccctgaatccagtagggagacaaggcccccttgtatccgggatgtccgggaacggaagaaagagtacggaacttgataggcttggctttgaattcggaattgctcatgggggcattcgtggcgcacagcgtggcacgcgtgtgcccgtacttcccgcaccagtccccttttgtagtccagtcctccccccggaacacaatattcttccccgcatgcgcatcggaccccagcctttccaaccttctgagcaccacagaaggctcctccatctgcgccggacgagggaacgggacttcattgtccatctgttccctgtccagtttataagccagagtcccctttttcagacgaacaaagccccgtccgtatgtcgccgcccaaacactcccgtcctgaagcgccagcaaggaaggaacatccacgttttccagccccttccttattctctgattcaccgtcattttttcagcatccagaacatccactccctgcatccggtagccgatgaaaatttccttttcctgctggataatggaagaaataaaatcttcagacaacattctggaattcgactcccccggcaccgcagtcttccgtgcggcagaaccatacagatggttgtttttctgggcataatcacgccctctcatataacgccaagaactaatgccgttactgtacgccaagcctgagcaggtacctaccaacacctggcccttatccgtacaagtcaaaacattgcagatattggaaggcaaaccatcaccatacggctggtacggctgacgggagaattgcctgttatcccagtaccagggagcctgaacatttttccactgcatatactttgactggcgcgaagagcaggataccccgccgcaagcataggccagccacaaattccccctggtatcaaaacctgcggaagccgcctggtcttccaccaggccggtggacctgtccagcgtcttccatgaatcgcctgcaggatcgtaaatggatacgcctccggatgtggcgacggccacctccccggaaacgggagaaatggccaaagcataaacatgctctccattcagggcattgctgcggtcatacatcttccattcccttccgttaaaaacggctacgccgctgtcatccgtgcccgcccagatgcgcccctgcctgtcctccgcgatacaggtgaaattctttcctttggggaaaccggaataataatccatattaagccacgatttttcatatgtccggtccccaatctgaaggcggtaaatgctttctttttctcctacggcccaaatggagccgtcgccagctaccagcgtgccgcgaataaaacggaccggacattccggaagttgctccggtatctggacggttacgacctttcctgccgcccacgcccccaacaaaaggaaaatcaacacaaatgtccctacgaagtgtttgaatttaatcaacataaccaactatctcctgattattgcaggataatattatcggtttttatcattgtcaacgccattttcaatttattgtcaagtttatccaaacaaaatacggcataattcgtttagaattatgcacataaacaatttaatatatgttagttatattaaaaacatcaattccaagaaaatcctcactaatacttttttatgcttggatgggaaaatacagggaacaggcctgatagcaacgtccggcatttcgttttttcaacatgttttccccggttattctctgattcaaatttcaaacctaccatgcgtttccccatataaagttatatttaccggccttttttgaggcaggagaataaacacagctcaagatccgaaggagaagccatctactcttccgaagcggcaataggaggcaatatggacgttcccggaggagggcttcccgatgatggccaaagaaaaagaaagtgttgtcctcaccaacacgaacaattcttccggacctgattccagcaaccagttccggcatagtcacgcagcacccttccgaccatgaatgaggtattgcttcataaagcgggactgacggtcaactgtatattaaagccaccaaaggaaaggagggaggaaccagtccgacaggcggaaaagaagaaagcgaagacaaaaaagatggaataaagcccccggttttctccctagatggcctatccgggcgattataatagcggtctgcaggtttctgttgagccccaagccgggggtatgaaacaccgcctccctaaaagatacggccaaattcacgacagatagaattatgccgtcccgtacgttctttcctcatacccaggtgccaattattacttctagataaacggaaaaaacgaacctccctgacctatccaacccctccggattatttctggagaggaaggtgttccgttccacaacaaagaaaaggaacatatcattctgcatccggcccatagcagaacagcctttccgccccggattacctccctggggctgttgaataccctgctgaaatatcgaaacgtatcaaataaacacttattaaagctccgcagccgtcaggtccacgcacaaaccttgacaactgcggagctgcgcttacacacacttattcatccaacaaaaatcgctcagcagagcttcttccatcaggaatggtggaaagccgttccttcttccgccgtcatcggagaagagaccgggtgtttctcgaagaaagagagcatgcgcttgtagtcttccaggaacaggtctgccaaatctttggagaagccctggcgaaccatgacgcgcatcaccaccgtatcctgacagttggcagggagcgtgaaggcgggcacctgccaaccgcgggttctcagcttgtccgaaaggtcaaagagcgtgtagttcgcacgggctccatccttgatgaagaagcagacggcgggaatacctttttccggatcgcccgtacaaatgaattcatacggccccagtttggaaagctcatctgaaatgtacttcgctacttcgtaggcctgtgtatggatgttcgtatagccttccttgcccagtcggatgaaatcataatactggcagataatctgtccggccggtcgtgagaagttaatggcaaaattgggaatttccccgccaagatagttgacattgaagatcaacccttcaggcagttcggaaatatctctccaaacgacccagcccactccgagcggagccaatccgtatttatggccggaagcactgatggacttgacgcggggaatgcggaagtcaaagacaagatccggggcgcagaacggagcaaggaaaccgccgctggctccatctacatggatgtcaacgctgatgccggtcttgttttcataatcatccagggccttggcaatctccgccggcaattcataagcacccgtataggtcactccgaacgtgggaaccacaacgatggtgttctcatcaatctgttccagcatccggtcaacatccatcttccattttccgggcgccatcgggatttcacgcatttcaatatcccaatagcggcagaacttgtgccagcagatttggacagggccgcataccaggttgggcttgtcaatgggtttgccggcggctttccggcgggctctccagcgccacagggcggccatgcctccaagcatgcatgcttcactggaaccgatagtggaacaaccaataggcttttcattctggctggcattccaaagattggcaataatggcagcgcaacgcatctcaatagcggctgtctggggatattcatccttgtcaatcatgttcttgttaatgctgagattcatcagcatcctgacctgcttttcatcccaggtctggcagaaggttgcaagattctggcgggcattgccgtccagcatcaattcatcggacaccaattggaaagcgtcctccgcgcgcatcgcataatccgggaactcatccttggggagaaggttatctgcttccggagaaccgaaaatggaattttccgcccgggctgtatcgggtttttgatttggatcaaacatgacggtatctattgtttcatcgtttccgggccaaccgtgaaaggcaacccgcatgaaggatagaagcacccgagaataaaagcgttcatatttccattgtcattatcctaggtataattttcccggaaaaacacagagtcgagatttatttcatcattcattgatgactaaaaattatttaattgcaaatatctttataaaaactcgccaatatctccagataactttatgtatgacatctccatattatgacagttaagagaaacggacgttttcggatgcaattcccagacgggataatgtgttaccccctatcttaacaatacaacatccattggaaaaaactgtgtcacggacttttacggttcctgatgctgaggcgtgcatgcgcactttcagaaagggaaaaatacggattaacccgaatttccatcaaaaaaactgctgcacaataataaaaccaacatcgtggaatcttccccgcttttcctgatgagcaacttctggtgcagacagggggaagaaatacccaacctataccgggttaatgccgtggcaagttacacccttttaagccacggctggcagcagaggtaccttctccccctccctgcactttttacccggtcaacaggtggcattccttcaagattactcccgttcaattttccggaaggtatccttcacataaagtacatgcggataaagaatggaatccggagctactttgggatgattgaattccgctatttttcgcattccaacacgttgcatcacagcttgtgaagggaaattcacgcaagcagtaaaagaatataccctgtcaaagccgaatcgtgcaaaaccatgtttcaggcatgcacgggcgccttccgtagcgtatccgtacccccaggcttccggcacaagcctccagcctatttccacacacggtgtaaagtccgcttcaaaatcagcccaatgaaagccgagaagtccgatcaaggaaccggaatgtttcaattccactgcgtacaatccataccctctttcatccagttctttccgtatacggttccacatggaaagagaatccttttccgtcatgacaccgggaaaaaaacgcatcacctggggattggcgttcatagccgcaaaaaaaggccagtctttttcccgccactcccgtaacaccaggcgttcagattccggcaatgacagttttcctcccggcatggccttagttgtacatggaaagctctgtttccagctccgggcagcgattcacgcgaaaccgttcatccagttccagaatttggctatggcccaggctgtccttgatggtgagattgactttggaacgaccgggatacctttttagaatatcccgtatctgttccagattttttctcgtgtggcggaggggactgacaatgatattcagaggcccctgatccccggatttggatttgcgctttttgcctccaagtgggtcaatgctctgggcagccacgcttttggaggatgtacggtcatcctcccggatgttggctcgcacggagacgaaaacgcccggctccaagcctccctccatttcctgagccttttcataaacatccgaccacaacaacacttctatgctgccggtaaaatcttccaacgtcagaatggcgaattttctaccggccttgctgatttttggggtgacggaacgaaccatgccggcaatctggtgcttctgcttgagttcgtgtggttccagcgtgtcaatgagtcctatgcgggtatatttttccgcatcaatgacaccgcgcatggagtccaagggatggccgcaaaaataagcgcccaacagatccttttcatctcccatacgctgctccttggaccactctggaacggcaggttcatccttcaccctgggcgcttcaaaggtcatgtcaaacagagacccctgccccagagccttatccttatgtacctgggaagctccgctgagggccaggtccacacgttcgaacagaacacaacgcggctccagcgtccagtccagcgctcccgcacgaatcagggattccagaatctttttgttgacagatttggaatccagcctgttacaaatgtcctccatactggaaaattccccattcttctctctttcttccagaagaatctgcatagccccctctcccacgttcttaatggccgccagcccataacgcacggccagcttgccggagggcattttctcaggagtgaacttgagcatggatttattcacatcgggaggcaggatctcaatacccatgcgattggcttcctgaatgaacactccgattttgtcattgttcgcctcattagacatcagcccgcagaggaattccacagggaagtgggccttgagataggccgtccagtaggaaatatgcccgtagcaggcggagtgggatttattaaaaccatacccggcgaatttttcaatcttgtcaaagatagctgtagccgttttttcatcaatctgatttgttttccagcatccttccacaaagtgggccttttccttggccatcttcgccgggtctttcttgcccatggcgcgccgcagaaggtcggccccgccaagcgtatagccggccagcagcttggccgccgcctgcacctgttcctggtagatcatcacgccgtaggtttccccactgacctgttccagcaaaggatgctcatactccacctggcgcagtcccttcttcacttcaatcatttcatccataaactgcatggctcccggtcggtaaagagccagcaagtcaatgatgtcttcaattttctgaatcccgtaacggcggcaagtgtccaccataccgccggattccaattggaaaacccccatcgtatcccccctgttcagcaagtccagggtttcccggtcatccagagggacggaatccagtttgaactccggcacgcgccagcgggcgtattgctccgcatcatgcatgacggtcagggttttcaaacccaggaagtccatcttcaaaagccccacttcataaatcgcgctcatgtcgcactgggcgacgacagcggcatgaggatcggacagatcgtcacgggtaagggccacatgctcgtccaggggacggtcaccgatcacaacacctgccgcatgtacccccacgttgcggatcaagccttccaggcgggtcgcgtacccccacaattccgcatacccctcatcagaggcaatcaactccctcagctcctcgttactcttgtagctggactgaagagtcaccttggggccggtttcgataagtttggaaatacggtccccgtccgcataggacatatccatcacacgggctacatccctgagtacggacttggcccccatggtgccgtacgtaataatgtgggaaacagcgcgctctccgtatttctgccgaacataatcaattacttccggccggcgtgtctggcaaaagtcaatatcaatatccggagggctgacgcgttccggatttaggaaacgttcaaagattaatccgaatcttagaggatctatgttcgtgattttcatggcataagccaccaaggaaccggctgcggaaccgcgaccgggacctacgggaatgtcatgatccttggcccagttgatgaaatccgccgtaatcaggaaataggagggaaatttcaactggttgataattccaagttcataatccagacgatcgcgcaattccttatctgcagctacacgttcctttccgtaccgttcttccagtcccttatagcatactttacgcaggtattcttcgcgcgacgacccgtccggcgtgccgaattcggggtatttctccgtactggtggaatccagcttgatggtaacattgcaccgttccgcaattttcaacgtattttccacggcctccggataatccttgaacacctcccgcatttcctctggagatttcaaatacacttccgtggaatagcgcatgcgttttggggaagccagtttttcgttggttccgatgcaaatcagaacatcgtgcatgtcgtgatcttccttcctgaggaagtgcacgtcattggtggcaacaatgggggtattggtcttgcgggcgatacgcaccagctccggcaggcattttttctgttcctccatgccatggtcctgaagctctacaaaaatattgtcgtccccaaaaatatcctttagcgccagaagggcttcctctgctttttcaggctggtcattgagcagccactcattaagcggtccggcaatgcatgctgtacaacagatgaggccctcatgaaattccctcagggtttccatatccacgcggggtttataataaaagccttccaagtgggaacgggacaccagtttaaccagattctgccacccggtttcattttccgccagcaaaaggagatgtgtgtatttgcggcggccgggaagctgttttttcacgctgatgggcgtcggggaaaggtaaacctcgcaaccaaagataggctttacctcctgcttctgcggtccttccggatgctccttgttccaggcggccacggatttattgaggctgtttgtctccatgaccagttcaatggctccgaacaaattgccgtgatccgtaacagcaacggcgggcatccccatgcgggaacactcagcaatgaggtccttgatatggacggcgccgtccagcaacgaatattccgtgtgattgtgaaggtgtacgaaggaaccgggcatggatggatcctgtaagcggttaataaaggaaatcagcggtgaacagggcattcggccttcatggcttccacgcattcccggataaggtccgggccgcgataaacgaagccggtataaagctgcaccaggctggctccagccttgattttggcgacggcatccgccccgttcataatgcctccaacgccaatgatcggaatacgtcctttcaattcggaagcaaaagctccaataacttccgtggaccgttccgtcagaggagcgccggacaggccgcctgcttcttcatgccgaggattggcctctaccccgacgcgggaaagagtcgtattcgtagcaataagaccatccagtccctcatccagaaaaacgcggctgagctccgcaatatgctcatctgtcacatcaggagccactttcataaaaatgggcacatggcgacccgtttccgcagccaggttggattgctccgatttcagggaagccagcagacgggcagcgggttccgccgcctgaaggtcgcgcaggcctggcgtattgggagaagagaaattaatggctatataatccgccacaggccaggccgcacgcagacaagtaaggtaatcctgggcggcatcctcattgggagttattttatttttcccaatattgacacccagaacaccgtgaaaacgagtggcggaacgaatgttttccactccggcggcaataccttcattgttaaatcccatccggttgataatagctttctggggaatcagccggaacaggcggggcttttcattgcccggttgcggccggggcgtcagcgtacccacttccacaaaaccgaatccggcctggccaaaagcgcttaccgtatccgcttccttgtccattccggcggcaagtcccacccggttggggaatttcatccccaggatttccacaggatcagaaggaacttcccccattactagaggcagtacacgcattttttctgccaggcgcaacccccacaaggtcaccttgtgggcagtttccggattcatttggaataatacacttttagcggcggaatataaggcgggtgacacaatgcggggagtgtatcacaccctcttttagggtcaagaatgggaagcgtcttgccgggatgattttatccggtacaatcccttgccatgaacaggaaggaatgcctctcatcctgccgtctgtacggtattgtagatatgggatatacagctgaacatcaactactccctgtaacagaaaaactattggcaggcggcctgcgcattctccagctaagggcaaaaaaccataacccggaacacattgaaaatatggggcgccagcttgcccccctgtgccgtaaatacggctgtcttttcatcatcaacgattatcctgaaattgccctgaacatcggcgcagacggcgtccatctgggacaggatgacggagacttggcatccgtaagggggctgctgggaaaggatgccgttataggacggtccacgcatagtcctgaacaggccctgggtgcatgtggagagcaggcggactatatcgggtttgggcccttgttccccacgggtaccaaaccgggaagacaggccattggcctggaagacatcgcaagcgtacagcaacagctaccggaaaatttccctgtcttctgtatcggcggcatcaatgggaacacactgctctccgtactggagacgggggcaaatagggtagtcatcgtttcctggctgcttacacaccccgacatcacgggaacagtcagaactctcagaaaagaactgggagaagcgtaacgaaaaacgcgcacccccatccatgttatccctgcctttcctcttcctccggagacagagccggacgggagatcagaaaaacggcggtattcacaatcatctgcaaaatgtgctcctgatccttcatccacggttccttttcttgaagatccatgcacgcgacatatttccccaacgtagcatggaagatggaactcatgatatgcgcatgccaagataaggaaagctcatcatcccacggacagaatctccgaattcttgctatcatctcctggatagatggagcataaaattcatcatagatttttcttccaagatattccggctcctgcggcaaacgccacaataaacggacatgatccggccctcccaggctctcatccagaaatagccgaaaagcaggttctataaatgcacgggcatacgccctcagggacggatgaagatccgcctctttcagcatcttcatgcgcgctttcatcagaggttccgcatattgtctgtaaacagccagatacagtccctccttattctcaaaatagtaaacgatagaagccagattaactcctgcttcagaagcgaccgccctcatggtcacgccattaaatcccctgagggcaaaaagcttctgtgcagcacggaggattttgccgctggtttccgcagaacggtcggactgggatttgcgggtagaagacatctcctaaacaatcagacaatgcgccgcctagcgggaagaacggcttgagccgatggcttttaccaactgttccatgttttgggaggactgaataggcttgccgtccttgtccaccagaatcatggtagggataccgcgtggagccaccttcttggcaagctccgtcaaatcctctttcaacaggataggccatggcatgttattggcagcagcccatttttgggcggcatccaggttctggtccagattgcacatgattacttccacatccggattatcctttaccaccctgttataggcctccacgctgtgaggcgcattccggcagcaaggaccgcaccagcttgcactgaaatacaaaatgaaatgcttgggattcaatttcccgtccctctttttaagtttgccgttttcaagcatgtaagtctttcccttcatctcctccgccacagggccggacggcatggacgaccattctgcaataggcttgccgataacttccttgtgttcctccagccatgcgcgatcttcatcggaaagcttttccagcggcatcgtaatgggctttttagccgtcgtcaccaatttgacggtcttcatattcagggctactggacgggcttccaccgtactgcccgtatttttattagtccaggtgcggagggaaggatcatccgctactccggaagaatccgcccaacagagagaggaccccatcatgaatgtggatgccaataagatacaccaagatgaaaatttcatacacataatgctaatatactatttcttatcttccatgtcgagaagctgattccaaaatttgcctggcccgggcatgtcccgggtcgcggcgcagggcttccgcggcagcggcagcggcctcacggtaccgcccattgcggtaaagcatcaccgcaagagtgaaaggaatatccgcatttcccttttccagggaagaacagttttccaaatcctgcaaagcctgctccagccggcccactttttcattcaacagagcacggttaaacaaagcacgaataaaggaaggctctatttttaaagcttcgttaaaggattccaaagctcccgactcatcattattttcaatctggcccagtcccaggagataccacagattggcatccctgggagccaggcgtacagcctcttgcatctgatccaccgcctcccggctgcggccttgagaagccaggaaaacggcataatcacggtgcaccacggatgaagtggcatcccatttcaaagctttggaaaaccacaattccgcagttttcacatccttacggctaatggctatctgggccagcttcatagctccggaaggctggtccgcctgatgcaaagcggcagcagtaagctccttcattcccggactgtccggaggcagggaatcccggagagcccattccgcctgcaagcgcacgaccctgaacggatcattaagaagtttgcccgcagcaggattacccactcgccccatcactttggcggcggcggctcgcgtcagaggatccgggtccttaaccgccgccgcggccacttcctggacggcgggttcatgagcccatgcatccatcaaatccaataacgtagcgcgccatgcacccacttcctccctcttaaaacattccataagcagaggcaaaacatcttcctttccttcgtaggcatgctgaacggccctggtccgttccctgtactgcgccattttgggtttagctccgtaatatttctttaccgcctccgcagcccattcattgcttttttcctcgtggcacatggtacaggcattcggaatccccaactctacgctcagcaaaggatcaggagaattgaaagaatgatccctgcgggggtcccgagccatatacaggctttccggcatatggcattccacacaccgggcacccatgctggactgaggacatggcgtatgcgtagccatgtcaataacgggagcttttacgccgtttaccgcttctccagtaccgtgacacctcaagcagagcgtattatcttcttgaggaagcttcagtgttcccgtatgcggatcatgacagtccaaacaggtcactcccgccttgcccatacggcttaacctcagaccagtctcgcaataatcctcatccctttgcatgccattgggccagaaaacgccgggctgcacgggaagcaccagttggaaatgattgtcaaagcggtcacctacggcaaaatcatgatcaaattcatccctccgggcatggcaggaagcgcagttatcatgaatctgctgtggcgttagcttgttcctggtggaaatcatgcaacccgtccccgcctccggcttgtccagcagggggccgtggcattgaatgcaagtcactccgggttccgtccaggtagaagcataccgatctttaacaggatcataattcttatggaacaaagacatgtggcaccacgcgcactgcgtgttccaattcatgcctcgtcctgtccagtgcccccagtctcccggctggcgggactccttgccgaaaatatcaaaccattctttgcggttcacgtcccatgcagcgctcaaggtatgaaaaccgccgtccttggcaggaaccagatactgcaccaggggaattctccctgtggcccattccgcgcgccaggaggttgaagactgaccgtcatggaccatgcgcccgtgaccattcgtagagaattggagaatgctgccatgagcgtccagcttcatgttatggaacgcttcagattcccattgatctcccagtttgcggaatgcccaggcatggtctgaaccggcccactgacggaattccttttcatgacatgctccgcactgcatggaaataggcacctcattctggtcccagtgctcactgcctcctgaaaaaacaaccggctgcgctgccgctccagaacgtttgtccatccaggccttcaccattgtgcccagtccgatcaaagccccaagaacaacgaggagaaccacccatttcttcatggaagggcggttcacaggggcatcagcagattcaggggcggacatggcggaaatattctgccatatcatacgcgctccaccaaggaacttttacatcaggcagcacagtccttgacatgcccagtccgtaaacggcagattattcctcctcttccaggacctcttcccgcatcagggtagtaatccgggtcacggtacagcgctccacaccgccattctccgtccgggtcaccttgaattccagccctctatagccgacagtatctcctttctccgcaggagcttccagcaaattaagaatcaggccccctacggtgtctatttccccgtcctccaaatccatgtccatggcctcccccaattcctcaatgcgtgccagaccggatacgtcacaggagaagcccaccgcatccctaggcaactccgtcagcactttaatgcggcctcggtcccagcccattacttcggaaaaaacatccgtcagggtcaaaagtccggaagtccccccgtgctcatccagaataatggcaaggcgcacattgtccttcctcatgatttccaccacattgtcaaacttcaccgttttgggaaccttgggtatggcatgaatgtattcaggagtcagagcctttctgcggaacatgatacggaacagatcgcgggcatgcaccatgcccaccacatggtccagatcaccgcggtagacagggtaacgcgtacggcgagtgcgacgcacaatttcccgtatctgctcatgttccgccccttctggaatggcgtctatcctgacgcgcggggtcatgacctggtgtacatacagatcatccaggtcaaacaagccgtccatgatgcggccggattcctgcggcaacgccccgttctcatggctctcttcaataatatactggagttcttccgcagaatggtagtgggacttggattcattacggtccacacccagcaaccccagaaagaaattgcccagggcattcatacccactaccagcggatacagacatagctggatcacgtacatgggcatcgcaatgatgaggcaaagctttgcggcgtactgtagggaaagcgccttgggcaccatttccccaagaacaatatgcaggtacgtcagcaccgccacggacaggatgctggctgcgccatgagccaccagccaggaagcccagccgtactgcgccaaccattcatggagccatccagctaccgcatgctctccgtacatacccaaccccagactggcgaacgtgacgccaagctgcgccgtagcaatgtagcggtcctgtaaccggggcgttttcaatatctgggaaacgcggcgcgccaccatgttgccggacacacccatctgctccaatgccgcacgcggagcgccgagcaacgcaaattctgcagccacaaacaggccgttcagcacaatcagcaacagaataatgaaaaccgtcatcatgcatccaccccgctttccatggcaaattcattttcctttctctccggaggcagcagcaggatagaggaaacacggttatggtccatcttttccaccacaagcacgcgtccggcgataatcaggcggtccccatccttcggaatgcaggacatgtgcttgatcacgcagccgcccacagtagtggcgccattcatcaaaaagggtaccaggcattccgccttatgggcacgcatcatgccggggatgcgcacggaaccatccggaagggtttccaccttttccccggagcggatgaattcctcatctatatctcccaccatttctcccagcagacgttccagcgtcaccagccccacaaacttaccgtattcatccagaacaaaggcttccttggccctgtcttcccgcaaacgggccatcagcatctctaccgtctgcatttccatcacgcatggcacctgcctcagcatggaacggagaggaggcagaattcccttttccgcataagcggataccatatctttaatatgcagcatgccaatgacagattcacggttcccttcatacacgggaatatgggtatgaggcctatctgcgatcatattcaaaatatcttcctgtgtggcatccacatccaggcaaacaagctgaaaacggggaatcataatttgttccaccgttcgttccgccagggacaaagcgctgtgcagccgttcatgctcatcttcctccaacatcccgccctggtgactttcatccagcagcatattaatctcctgctgggagtggatgtgctgatggccgccaggtgggagccggaacagtttaagaagcaacaaaccgcttccattaagaaagtcaatgaaccatgcgaagaaagccagtgtccatcgcatgggataataagtatacaaggccgcctgcttgggaaactgaagagccagggatttgggcatcaattctccaagaattacctgaaaaaccgtcaagcctatcagtacaacaagagcggctgcagaattggccattacggagtccatcccaccaaaccgctcaaacagagggaacagataggcggccagttcaacctgtccgtatgcgcccagaaccagactggaaatggtaatgccgaactggcaagccgcaatgtagcggtccagctcttttgtattttccaaaatcttaagcagatgaacagccaccctgctgccgttctccgccatttcccggatcatgttgcggcgtacgctcactgcggcgaattctgctgcaacataaaaggcgttgaccagaatcagaaaaagaataacgaaagtgacaaaaagaatcatgtatgcaggggtgtccgtaaaacgcaacgggcatccgcatcataggaaccgaaaaaatcctgtcaagaacgggaaacaaaaaaatctgccatgcggaaagagctccattcctcccgtccctttccagcattccaaactttctccttccggcacaggtagaaaaaattccagctgatcacgcaagcagttgaagcaactgcaaaacatctttccagcaaccgaaaagccccgttcccggaataaccggaaacggggctgagagtttaaaggctcaacgaaaaacgttattccgtaatgccggcggcttctgcttcggcagccttggcatctcgcaaagcggcacgtatggacattttcacgcgtcccttgtcgtcaataccaatgcacttggcggtcaccacgtctccgacgctcacgacgtcctccgtcttggcggtgcggccttcggccagttcggagatatgaatcaggccatccttgccgggcagcacttccataaacgctccaaaggtggtcgtggaaacaatcttaccggtgtacagttccccgatttcaatggtcttgaacatgcgggtgaccaattccaaagcacggtccaggccttcctgcttggcggcgtaaatatgcacggtgccatcttcctcgatattgatatcggcgccggattcggcctgaatagccttaatattcttgccgccggggccgatcagttcgccaatgcggtcggcgggaattttggtggtctcaatacggggagcattcgggctcatctgggccggagctgcaatggcttcattcatgaccttcagaacatccgtgcggccggctttcgccacgtgaatggcttcctccaatatggagaggggaatgccgggcagcttgaggtccagctggtagcctgtcacgccttccgacgtgccgcagagcttgaagtccatatcaccgtaaaagtcttcggaaccgatgatatccagcagagttttgtaagaggtgatttcatgctggtcattctgttccgtcaccaggcccacggaaataccagctacagggcgcttgaggggcacgccggccgccagcaaagacatcgtgcccgcacagacggaagccatggaggtggaaccgttggattccatgatttcagaagagacgcgaatggcgtacgggaattcctgttcgccaggcacgaccggagcgatggaacgttccgccaaagcgccgtggccgatttcccggcggttctgaccgccgaaacggccggtgtctcccacggagaaaggcgggaaattgtagtgcaggatgaaacgcttttcattcacgctgcccgtgtaattgtccatgtactggcgttcttccatcggagcgagcgtcgccaggcaaagggacatcgtttcaccgcgggcgaacatcgcggaaccgtgcaccacaggaggcagcacattgacttccgcagtcagagggcgcagctgcttgagagcccggccatcggcccgcttgtccttttccatgatggagatgcggaaagcctttttctgaatatattcaaaaacctgttccacatcaaagtcagtagcttccggatggcgttccttgatggcggcctccacttcgtcacgcagggcccccacttttttctgacgctccaccttggaaggggcgtaaatggcttcctcaatacgatcgccggcaatttcatagccgatttccagcaattccggcttggcaaggcaaagttcataagcgcgcttctccttaccgcaaacggcgcggagctcttcctgcttttcgcaaatgaccttcacgttctcctgggcgacacgcaaagcggcgataaaatcttcttccggcagttcattagcggaaccttcaatcatgatgacctgatccttcgtgccggcaaataccagatccagctgactatgttcacgctgggagttggtcggattgataacaaactgtccgtcaatacggcccacacgcacagcccctacgggttcggcaaagggaagatcggaaacgacacaggcggcggaagcgccgttaatgctcaggatgtccggttcgttttcaccatcggcggagagcagaagcgtaattacctgcgtatcgtagaagtagcccttggggaacatcgggcgcaggggacggtccgtcatgcggcacgtcaggatttccttttccgtgggacgcccttcgcgtttgaaatagccgccggggaacatacccgccgcagcggccttttccttgtactccacggacagggggaagaaggtttgcccttccttgactttggtggcgcttaccacggtcacaagaacgacggtatcgccgctgcggacaacaacagcaccgtccgccaaacgggccatcttgccggtttcaatcgtgataggattcgtaccaacgttgcattcaactgaatgtatgctcattatattttttgtctttcaatcacccgcagcctcatcagcccatccaggccggctccgggcgggaagcctgaatggcgtcaggtacgggcagtgcctcaggaagatgttatccgcaacagtcctttcccagaaacagagggagaatactgtccacgcggcaggacgcgcatcccagatggatcaaacgctccggcccagtcttaccggcttgacagcctgtgaaaatccgaaaatttctcaaggcatgcccgacagaaacgtttcgggaaacgaatccccgaacgtcgaatgagagcataatccctgtcaaggataatgcaagcaaatagtttgataaccatagcagtccatttccttccagggctttaaatatccacccgcatggggagaaaaggtatttttcccatctcaccttcatccattcaatattcttcgcattcctgattgaaatgcattactccaagcaaaatatccggaaacgtccgccttcccttcttcacaggagcggaaatgcagaatttaaggacggactgagtattcctgcctgactcccataacagccgcccactgctttttcatccatattttcctattctttgcgcggctgcatcatacccgcaataccggactttccgtccccagcaaacatttacgcaggaataaaggggcagtcatgccaacaaaaacaatctccacactccagaatatcttctttcacaaaaagacaggcctttcaaactctcctgaccaaaacacaaatccacagtcacccgccatgccccccttccatgacaacgctaccatgccagcccctcccataaaaacaacggccgctgcggaaaaccgcaacggccgaatcaaacgggaatatgctccgccttttagcggcgaaggccaagacgctggatcagactctggtactgggccagatcttcacgcttgacgtaatcaagaagcttgcggcgcaaagccaccatcttcaacaacccgcggcgggaagaaacatcatgtttattcgtgctcaggtgttcggtcaggtgggcgatgcgctgggtcaggcgggcaatctggtagctggaactaccggaatccttttcatgcatcttgaattcctgcaaattgatttcgttactcataagtgttttccttgaatgtatttagctcgtggcagcggctaatcgacactgtgagggcgccaactatgcatcatccagccccaaaagcaattcaaatttcgtcatcccggggaatttgccttcggtccctgggaaagcggcccctctccattttccccggtgtcccagacttcgcggtccttttccgtcacggggcgaaccacacggcagggattacccacggccactacattggcggggatgtccttcgtcaccacgctgcccgcgcctatcacggaatttctcccaatacgcacgcccggggcaatcaccgcatgaccgcctatccatactccatcctcaatggtaatgggcagagcaaatcccagcccctgccgtctcagccccgggtctacgggatgcccggcagtataaatgcccacgttgggacctatcagcacgtcattgccgatggtaacggcagcgcagtccagcaccacgaggttgaaattgacatacacgcggtcccccagccgtatattggagccgtaatcacaacgcagcggaggttccagataacacccctctcccatttggccgaaaagctcccgggccaattcccggcgcaggctttcattttccggagcggactggttataacggaaaacaagccggcgcgccctgagccgggcggcagccaattcagaatcctgggcatgatataaacgcccggacagcatgttattccagtccttcgaggccattggatgaagagggggtcacagcgtccgcctcagaaaaaggcagctgcccgtttttctgttctccaacagacggcatggcggcggcatctttttttacggacgtttccgattttacaagttccttctttccagaggaagctgaatttgcgccagccaccggggcagcaggcttgtgcaccgtccggaacattccggacggcttttgttgaagctcgtgaatattccagtttccatccctgacaaccacacgggttcctacgggagctatttcaaagagatttttcgcaatcaagtggggaacacggatacatccatgggaggatggatgaccgggcaagtacccttcatgaattcctacagccccgttcactctcatgaaatagggcatcttggcaggttcaaacctctcgccgggacggggggaatcccttcgtatatccccatcccgcaattctccgtcagcgttaataaacgcaccgtaataggaatgatggtcttcctccttggaagcaatgaggaagtagccggagggcgtcatgccggaacttcttccggaactgatgggggcatacgcaatgcggtgcgtcccccggtagatatacatcatctgctttttcttatccactacgaccagcagctttccgggcagcgacggatcatcttcccacttgagcaggtgccccggaatagttcccgtttcttcaaaataccccgtcatttcttctaccggaatatgggaagaggggacaggggaaagctcccttcccgtggtaccgcaggacgaaaacaaaaacggaacacacaggcaggaaaccaacggatggaaaagggataatttcatctcaataagtcgcatcactgcgttagacagctggaggccggaaaaaagaaccgctttttgacaaaactgtcaactatcaatcaaaaaaatctcttttcctttactcctgccctctgttaccacatccgggcgcgcctgccgcgctcccggccgttcccggttccgtggagcaggccatgggaccaagcctccgcaaaggttcgtgcggcatccgccgtatgggaatgcccgtcatgcacggggctttccgcaatggctccgcctacgccgggaggcctggacctgtacaactccagatgctccacgcctcccggctcctcttccccacagaagcctcgcgccttttcctgggtgcgggcatggaaaaaactgcgctccagcaattccctcagcgtattaatgccacgccagacatccgtggttctggggacgacgcgcacattcaccaatcccagcctccccatattctccacataagaaatgccgtgcgcatccctccgtgcagcatcatgaggcaaaagatggaatgttaccgccacaccatgatttttctcccagtccttcattttttcaacgtaatgggccaggggctgctggctggcggcataatggtccagccagtggaaactgtctcccatgatctgcacaagccaaatggccgtatggtcactcagccccagatcccatgccgtgaaagtgggagcgtccggatcagcctcaaactccacccctacccgcccccgctcccgcagggccatgatacggctgccgtaaatactgccttcttcccctgtagcaaaagcctcctgcggcgttcccggatactcctgcttcatggaggcgcccatcacccgggccatccgggcataccatctcttctgccccgcatccagaaccactccggtctcccgttccagagaaaggaaatactcatccagttccctgctccatctgccgcgccccggcaaagtgtactcatcctggtcaaaccagctgaaaaaaaagaatctgaaatccaagggggaaagctcgcttttgcccatgttttccatggcctggcgcgtcagttcataattcactccgtaccgtccgccctcatgagtgctttccttcagaataaaacctccggggggaactgtattgattgcccccgtacggatttccctggctctccacggagcatgcacggaaacatacgccagctcggaaacatggagaaactgcatggttccccctcgcagattagtccccacccgcacatcgctcccattggagaaagccaggcggctgcgcgccaacgtacggggttgccattccccctttttttccacgccggacaggctcttgattctctctcccagccgggccagggccacatccatcgcagaggggttgggcggcacgtaatccagatggtcccaggcaaaatgcagcttggccagtttctgctgggcgtccggcaggcttttatcaatgattccgcaatgaaaattggaccggaacaggctcatatccagcatcaacatggccacatacgtagaaatgcccaactggcgcgccttcaggatgtcattcctgtaccacagccgctcatgcagccgccgctgcgccctgttcagggaaaaacgctggagctgaccggctttattttctatccagtacaggtgttccagcctccaaagctggctggacaggacggactgccacgacaggctccatgattccgtcaaatgattagaattttccatactcctctattaattctttcaacagggctccttccctggtcatccccttctgggcctccgtccccttgtccaggggaaggcggtatgccagtggatcgttcagcacgtgggaaacgaaccggagtgcctgcaccatcacgggatcaagcagatcaagttttcctttcaaataactctcacgtacgcccagttcttcatacatcctgattacatcctccatgaagcatcccacagcctgtcttctgttccaccaccatcgttcctgagcatccgcatcccccagcgtttccaaaatccgacccaggaaccgggtacggctcgcccgtgaatcttccggggaaggttcctctccggctcccgtaaaacactccagcggaatataggaatcccgttcggacaccgcaggcgctccccggctgtccagataaacgccgttccatgcatgtaccacgtagggcgcgcgtgcctgccgtacgggactttccggaatgcccggcatcaggcgcacggtatgccccgggtcgtccgggtcacggtaaatcacgcagttggcatacatcgcgcgcgcttcctccggctcaggaagaaagggaagcatgccgcctctcagttcctcctgcctgcggtccagaacaccaatcagggaaatggcctcatccaacgggagttcccggttccagacagacgtcacccccccgggagccgctccggaatcaatccggtaaatcttccctttccaactaaccccggattccgtagcttccggtcggcctgcaaaatcccgcctcaccgcatccagcgtctccacagcccggaccacatccggacggctacgccaggcggcaggggcgggaacgccacgcctgacggaaaaatcttcttccacatacaggggcgcttccagaatgggttccggaagatgttctcccaaagcctccagggaaacatccttcgcgcgcagaggtcccaatccggtccggaacggctttttcaccaaatgcaggtacaggccgggatgttccagatccggacgccaggaattcagctgggggaactcctgaagcgcccgggacagttccctcatgcggctttccgccagccgctccatcctgcgtacggaaccgcccgcgtatccgtccagcgcggacagggaacgcaccagtccctctttcacgtgatccggaacggtaaacaacagccgtccggacatcaggctgtgagagtaccgctccaccatggggaggcggacctcccctccggccggatcccaggcacgctccgcccgtatgcgttcattcataccaaccgtctctcggagcattcccataaactcggcagtgtccgcatcctccctcagcgttttcttcagcaatccggcccggctcaccaattcctcaagaggttccggaaccctgtcaggcattgcggccccgtaacgcgcccaggaagccaccgtttccggtacggtgtcatgatccagatgggcaaaaaaatactccttggacagctgggacaactcttcaatcagttccgtttcccctgggagcttcctgcggcgcggcacacgttccaaatgtttcaacatctcccaagcgccttccggggaaagctgatccgtgcgcatcagccggtcccatacgacttccgccttgtcttcgatcaaagccaggggattggccgtattatgaagcctcagccggtgcattaccaaccccttggctgaggaaacgggcaaattatccgcatccacgcccagcctctgtacggaacccacatacttttcgtgaatattcatgcgctccaacagggcatcacggctcatcagcgtttcagcggcaaggcgcccccggcccgtcacctccagacgatccccggaccccaccgctccgcgcacgccgtaaccagctttcagcatatccgccaccgccatggccgtcaggctgtcatacaggcaggggagccgccccccctgcacgttttccaacccggtggtcagcctcagataattggtatcccattccggccgcccgttatgggcatgccattcccagctacggatcaaatccctcttagccgagcaggcggcagaaaacatcatggaaacattggccatcaggtccgcttccgccgcctcccgagaaggatgccagtccgaccaccttccattgggatactttactctccacagcctttccgccccttcccctccgggtgaggactggaacaggcgcggggtcagcaggagaagactctccaccgctttccgcgtccccggataaatacgcggcgaaacctgttccggaccggcatgcagccgcggagcatccagcacagaggcataacgggccacgttctccggcgccacctccagaaaccgggccagcaaccgcccgtaactctccacgggcgtatagccgcgccccacatgcacgtcaaattccttcatgttgggaagtacgtggtacaggctgttcacatccgcctggattccccataccatgcggttcatctcccgcagctcagggcttaccccatggcgttcctctccgccaagagaagccatcatgccgctcatcctggccagggcggagggaaggccgtccggattaaaagattcagacaacaaatccggagcattcagcaacgcactcccttcctccagccaccggcgcgccctgccgcaggcgccttcatcccggcaaaacgacttccataaacgaaaagccacatgcccggacgcctcttcatgcggcacgccgtgtacccgttccatcactccttcataaacattggctcgtgtccgcagatccatatcctccgtaacggcgtcccagtccctgccggaaaaacccgcacggcgtcccgcctcttccggataagccagcagcaacatcctgtacggccgataggagcgcttcttcagcctgtccgccacaaacgctcggcgcaaagcatccgcatgaatatcatattcctccgcattccttaaacgccatgggatttcccgtccgttcctgttccggaccagacccaaatcttcctcttccatacggcccagagtctcataccaggaagaaagagcctcctctacggaaggccggccctgcgttcgcttcatctccacaccgggagccggttccgccgcataaacaagctgcccgtccgctgcggcggcttcacccacgcggggcagaccggcacgcaacagccacttggttctggccgtaacataatccggatgaggaaaaagctttttcaacaccgcttccgattcggggaaatcccgcatcttccaaggctttgtacgtacaggagaaggcaaatccaaaaaatctctcacatcctgttccgtcttcaaaaaaggctctccggcttcatccagggcgcgagaccactccaaagccttcctagaaatgtacaaagacccccacagcggagaattacgcagggacttctgcaacaattccccggcacggtttacatccttatcctgcaaaatcctggaaaccgtttcatccggaattccgaatactttcagaggggaaccgtctccaagcagcattccggcatggcggaaatggttcagagcgacctttcccgcgcctatcagcaggaaaggcatcatcatgacggcctccctcaactggtcatccgcggaagcctgtctggctttccatccctcccagtccacaccggacgccttattcgtaagagctcccacgccttcctgaacgaccatgggcgtcaactccatcaatttattttccgcctccatcttcacggcatccgccgcaacggctcccattccgggaaaaaacgcaccaggattccctgatgcgggcctcatggcccggaacgcccgcattccctgccccaacatcttctggcccagtttcgtcattccgaaggaaagcaaggtattcaccccgccggagacgacagctccccccatctgggcatcaaacacgccgtccgggttcatgctccgggcctccgccatatggcgccccgtctcccccgccatcaacatgccaagcccggcagggccgcaaaacgccaaagccgtggacgctccctgctgggccatgtccaccagcatctcccggaaccagggggaatcctttcccccacgcagcggggcaaactccatcctggcaaaattcctcagttcttcaaaactccgggaataattgtccagcgcctccttttcccgtccctccggcaggagccatgctgcgccgtttacggccagctgggccgcattctccgcaacctctgccgcaccgcgtttaagcgccccccccagggcatcccgaaaggcgggacgggaacgcaaatagggagccatcatgcggaacaccttctgacggtctccatcccccagggaagccaggcaatccacggcgcgtatgacgtccggaactccggcaacggctttccggttcagctgtatggcgggaaaaccttccttcaccggctcctcactggctaccagcccctccaatcccttgcggatgatcccggcggcatccgccagacggttcctgtcatccagagcatcggatacggccctgcctttcaattgtcgcgccacagcctgcaaatcttccggccatgcggaaatggcttcccttccccgttcgtcaggaaccgttccgccaccggacagagcacgttcatactcttcctggtataattcaaacaaagcatccctccgggaaaggcgtacctgattgtgcatggaaactgccacgaacaattcgtcatcagacttgccggacgctccatactgccgcgccacctgttcccggatactcttccagtccctccggatgcgttcacggggaatcgcgccagaatccgccacccaggactgcatgacgcacgcggcaattctttcccggtccgccgtcccttccggatacatcgcctccgctttcagcctcacttcccgcggaatggtcatcacatcccccgtcaatacgctattccaatattcttccctttccgactcccgttccgggaatttttccgtgccggaaggtacggaaaacactgcgttccctttccgaatatggctttcccccacagttccgggaaccgcttccggaaaactcccttccagcgggagcgcccctgtctgttccctggttccattatcttccatcatcactttccttcttttccgttattcatatctgaaaaccccacccagccggcatcctggaggcgtttctctttctcaaaaaccttttccatctccgcagccggctgctccggggccctcttcaccgcctctgccaattccgtctggacacgcttccattcctctgccgcacgggcatcctcaggcggcccccatgcgccattccggaacatggcggacaggcgacgggaagcagcgcggcgcaattcgcggggtatgcccaacatcacctcgcgccgccggagaagcctttccacctgaacggcaggcaaacctgaagtggccacttctatcagggcgtcagcatcttcctcccctccgcaatcctcatcaatcagcgaggtcatgcggcacaacagcatatcgtcctccggaatgctgataccggaaaattccgccgtctgcctccggtcacgggaagccgtataacgtcttagctgctcggaactgatcaagccatgcttttcagcattctccaatccgtcatcccgcagcaacccgccgccggacacggtgaccgccagagcatccgcataacgccgcttcaactccccatacgctgccgcagcctcttccgccaccttcttttcctccggagttcccggcatcttctcctgccgggaaacgaggcttacagcggccgccggatcacggcggacctcctccaccgcccggttcagcgctgcgcgggaatacgcttcctccgccatgcgggaagcctcctctcccgttacaaatattccgctgccctccttaatcctgcgttcggccaaagcggcctctcccagctccacggcagactccacccccccggcccaatatcggcgcgcttcctccaactgccccagacgggacatcttctgcaaataaatgctcccggcagtctccagattctctctcgccatggccacgcgctccctcaccgggccggacatacgggcaggcagataggaaggaagccgttctgacagagccttcttccatctctcctgaaggtgttccgaatcccctccggcttccagctcccgcatcacgtcctgttcaaaacggtacatcccgtcacgggcctgcgcccattggccggcatccctcacctcctgcatttccttcagcgcgggtcccgccactccggacacatccatcacgcccgccgccagatcccgcacaccggcggcctgtgcttcaaaagcgttcaatggaatcacgccggacaaatccggagccacatgcaacattccaaaatcctgtattcgtatagccatctttaacggcttccaagctaaagagcggatggaacgcacggcatccattccaaaccgtcaccgtccggcacttgccgcttgccaaaaccgggccgttccaacacaatcacccctatgccccgcattcgtttcaccgccgcatatgacggacgcccttacctgggctggcaaagccagccgggaggccgtaccgtccaggacgtgctggaacgagccttttccggactctttggaaccccctgccgtatccacggttccggcaggacagactccggcgttcatgctctgggccaggtttttcatgcagacgctccggatacccaccgcattcctgcggacaaatggcctgccgcgctcaacacgcgcctgccccgaaccatccggattacccatgcggaatacgttccgcccggtttccatgcccggttcagtgccacgggaaaaacctaccgttactgcatttcatgcgctcccatcctcaacccttttgacgccgggctggcctggcaccgcccgctggcatggagcgtggatattctggaacaggctgtacacctgttccggggaacgcatgacttcactgcttttgccgccctgcgcggcaatgaaccgcgccccattccggagggttacttccgccgaaccatcacgcagacacaagtggaacaggcaggggaacatgtcttcatcacctttaccggaacgggcttcctctacaaaatggtgcgcctcatgacgggagccgcccatgaagccgcacggggaaaaataacgctggaagaactggcgcgcctcatcaacgctccgctcccggatgacaaaagcccgttttgtgccccgccggacggactcacgctgatgagggtccattaccaggaaaaaacgttcggagacaaaaagaaaataaactgaaaacggccgtccttctagacgcgtgccgtaccgtacaacccttccctcctgatcagctcctccactttccggttcagatggggaaccggacatacgcccgaacgcaaatcatgccgtatgcgggtggaagaagcgggttcatccccttctatgaaaaaggcgcgcacccctttcctgggagatggaaccccgccgcggcggtaaacaatgaacgtcaccaggctggacaaatattcccagcgtccccactgttccagagaatcccactgatccttgcccatcagccagaacaattctgcaccgggataacgctccgccgtcctctcagccaccctccacgaccacgaaggaggcggaagctccaaatccgtccggtcaagcacggcccaatccagcccttgaagagccagctcaatcatccggcagcgctggtcatccgtcacggagggggcctgctccttcagcggagacagggaacacggcataaacagcacgcggtccattccgcaatatttccgagcatgctcggccacgcaaacgtgcccctcatgcacgggatcaaacgaaccgccgaaaatacacagcttcaccgtcatccaccagaagtcagagaccttccgttcccttgtaaggcagaaacccgccgatgggaacgcgcaccatccttttctccagaggcaggcggcggaagcgggtaataaaatccgtcaggcgaccgtaattgcgctccgtcttgggaatcccctgatggccgcaattcacatccgggttgtaatgcagctcaacatgaagatgggccggatacatgccgcggttcgtgccgatagtgcctacctgggtgccgcgcagcaccaactgtcccagcacaacgttaatatcgttcaaatgggaataaagagtctggcagcaaagaacctttccggacttgggttcacggaaagcatggcgcacaatcaccacctttccccacgcgccccgggcgtccgccgcataagttaccaccccgtggcctacggaataaacgggatcgcccaaatcggaattgcctcctttattgccgttccaatcctcgcccatgtgacggggacttttcaggcgcaaaccgcgggaccggtaatagccgttgccgtcaggcttccctaccggaaaatcaaaaccgtcacaaagaggaacaagcgcaaacttgctgtcccgccgggccatgtaaacgggagcgctctcgctgatcaacgcggaaccggtcagaaaaaccagcgccagcagtaaaaaacggaaataggacatgggaacgaaagtcctttgtatgctaaacggctccctactccgtatcaagcggaattccccgcatgtcggagttagaattcactaacacgctgtcccctgtttcccgcttcctttcaacttgacagcaaagcccccgtatgaaagaagggaggagcgactccgtatttttcaacacacttttttctgcatgaataagctaacaacactcttcctcggaacagttctctcttcctccatgctgcccggctggaccgcagcaccgcccaaaccatacggcgcgattccaacacctgcccaaatcaaatggcagcgcatggaattctacggcttcatccactttggcctgaatacgttcacgggacgggaatggggttacggcgatgaagacccgaaaatcttcaaccccacggattttaatgcctccgatatcgtctccacctttaaaaaaggcggaatgaaaggaatgatttatacggccaaacatcatgacggcttctgcgcctggcccaccaaatccacggaccacaacatcaccaagagcccttggaaaaacggcaaaggagacgtagtcagggaattcgcccttgcctgcaaaaagcacggcatcaaattcggcacctacctcagcccctgggaccgcaacaacgcggattacggcaaagatggctacttggacgtttactataaacaaatccgggaattgctgaccaattacgggcctgtctttgaaatctggtttgacggagccaatggaggagacggctattacggaggagccagggaaaagcgcaatatcggtgacgcggaaaaatactataactttgaaaaaatcgtggaaatgatccgcaaaatccagcccggctgcatcatctggggagcgggccaccacggagacgcccgctggggaggctccgaaaaaggccacgtcaattatccccattggagcaccgtagggctgaacggcggaggcggaggcaccggcatgcgcggcggagaacgctgggtgccggcggaaggagacaccaccatcaaccatgccggctggttctggcatcagggacaggcatcccgcgtcaaatcccctgaagaacttatgcaggtatggtttgattccgtaggccgcggagctaatctcattctgaacgtggcggcggacaaaacaggcagactggatcctgcggatgtcaaatccctgctggaattcaaggaactgcgcgataagctatatgctagggattacgcgttgggagcaaccgtcacagccagccagacgcgcggcaacgacaaaaaattctctccctccaacatgacggacggcaacattgaaacctactgggccgtggaagatgacaacctgacccccaccgccattattacgctgcccaaacccgccactttcgacgtcatccggctgcgcgaacaaacacgactgggacaacgcgtggactccttcaatattgacgctttcatcaatggcaaatgggtttgtatcgacaatgaagggaaaaccatcggcaaccaggtcatgcgccgcctgccccgccccatcaccacccagaaactgcgtctgcgcatcacgggcagccaggccacgccctgcatctcggaattctccctcttccgccagcccgcgggcgccgtacggccctccattttccgccgcggagacaacctcatcatcatcgcggacggcaaaaataaaatcctgtacacgacggacggcagcgaacccaaggcaggatctcccgtttacagccagggtgctaaatttacgaagtgcggcactgtcaaagcccgctgccaattctccaacggtaaactgggtcccgtcagccaggccaaattcggcatcagcaaaaccggatggaaagtgaaaaccgccacatccggaaatgcggcggcggccatcgacgacaacccggaaacctcctggctagccaaggcagaagcgcctcaatcctttgtggtggatatgggaaaaccgtaccaggtttccagcttctcctaccttcccagacaggatgggaaaacctccggcatgacggataaataccaatttgaagtaagcgcggatgggaagaactggacgaaagcggcggaaggggaattctccaatctgcgcgccaaccccattgagcaatccattaatctcaagaacgtgaatgaacccgtgcgttatttccgcttcatcggcaccagctctctggacggcaacagcgcctccgctgcggaaataaacgtcttcggcactcctgcagacaaataaacctcccaggttttccccaccagggcattccggtttttacggccggaatgccttttttgcggcacgaattcatttttgcgaaacaggctccgacacaaaccggcatcaaaacaagcaggagaatataagccggaattcctcccaactcatcctgcagcgcttcagcaggctgggaatgtcccgtatatatcgccgcaacggccaaaggtctaaagaggcggctccggcatggctgccgttttcaacccccgccggtatgcggaacatattgaaatcggaaagagccctgcaaccccatgccaacggcagaaccccggaaaaaacgcctgcttcctgaaatcagccacgatatcatctccggaaggcttctgttccatttcctgtttgtacgaacaatcttctccctgccgtcggaaaacctggagcttttccttacatcgtaaaattctattttaagcaaacaacgggcaaacccggtcaactcggcaagggacttccgcaaaacagaagctttcctttccaaaaatcaggcatgaaaaagggcgcatccttttggatgcgccctgtacaaatcatgctggcggcgaatttattcctggccgctgaaatcaggcgtgaggatcaggaactggtcactgatgtccttgccccttctcttgggaatgaaggtatcctgaaggttgtcgttgtcgtccagttccagggtcttggcgctctgggcagtcgtgaaaatcagaaccttgccgcggaagctttccgggtcgaaacgcacggcattgccggccacaacggtgctgccgtcttcaccgggaagcacggaagtgaccatcaggggatattcccccacggaacttccaatacccacttttttgttattgtcacccttgcgcatgacgtaggaaatgcccacttcaccgggggtcagggcttgaccgtcgtaaatttcgccgttgggagtaacggtggaaccgccggaaggagtctgaaccttggcgtagaagttgctttcggaaacagactcattgcccagaagctgacggaaatagtcattggaagtatcgccctgaagtgcgcccaggccgctcatataattatgctgggcaacaacgcggtcggcagtgatgtcatcggggaaattgcccagtttgctgttggccttgaactcgttcatcgccacgcccacgttcttcatgttggtcagggcctgcatctggtcgcctttgttgatctggttcaggataggaccataggccacggaagccagcagggcgataatggcaatgacaaccaagagttcaatcagggtaaaccccctgcgtaactggtgtgttgcaaaagatactttcattgttggatatgatggaatgtttacagtttaagaaaaccgtacgtggttatctatgttcgtttctactattaacgcgatttcccagtcaggacaagcatattctcataaaaatcttggtcctgcaaggagagaaaactctcccgcagcccccctgcaaaaggcccggaaaataccgggccatgggggaaaatcctacctgccgctgccgaaaaaggaactcaacccttccaaagctccggcggacggcctgtcctcctcggcaatcacctgccgctggagttccgcgatctcttccagacccttgcggcctaattccagcatccggttcatctgatccgccgtgaacacggcctcttcaccggaaccctgcacctccacaaactctccctggtcggtcatcaccagattcatgtccacttccgcatccttatcctccacatagcagagatccagcagagcctctccctccagtattcccacggatacggcggaaaccagcctcttcatgggagactccgccagctttccttccgcgacaagcttgttcacggcaatagccagagctacggaagccccggtaatggaagcggtgcgggtaccgccatcagcctgtaaaacgtcgcaatccacccaaatcgtgcgctggccgatcttgccaagatccacggccgccctcagggaacggccgatcagacgctgaatctcgctggaacgtccgtccagtttccccgccgtaatatcccggcgtttacggtcaagcgtggaatagggaagcatggaatactccgccgtcagccatcctccttccacacgctgaaccttcatccagcggggtacatcctcctcaatcgtaacggcgcaaatcaccttggtgcgtccgaaagtcaccagcacggaagccgtggcattcggggcgatacccgtttcaaagctgatcggacgcaactggtccacaagtcgtttatcctgacgttccatgcggggaatcatgacggatgccgtcatctttttcaaatggaaagatggaattcccgttccaaaccgctaatatccctcccatgaaacaccctcgtacccgtgtggccgtcattgacgtggtggccctttcccgccagatgatggaacacatgccgcggctctccgcctgggcggaggggcggaacgtttcctccttccctccggcctttccggcccttacctgctctgcccagagcacctacgtgacagggctttccccgcgggagcacgccattcccggcaacggatggtacaaccggaacatgtgtgaaatccaattctggaagcagtccaacaagctggtgcagggcccgcgcctctgggagaaactgagggaacggtacggctccggcttcacctgcgccaaacttttctggtggtacaacatgtattccacggcggactggaccatcacgccgcgccccatgtacccggcggacggccgcaagatcttcgacatttacacccagcccatggaactccgtgaaaccattaaaaaggatctgggagaattccccttccccaccttctggggccccatggcaggaatccagtcctcccaatggatagcggactccgcccggtgggtggaacggaaacatcgccctgacctcagcctcatctatctgccctatctggactatgatctccagaaattcggcccatcctcgacccaggccgcccatgcggcaaaggctatggacggtcttctctgcgacttgatcgactttctggaacgggaaggcgtcacccctgtcgtgctcagtgaatacggcatttccgacgtatcccgcagcattgccctcaaccgcctcttccgggaacggggctggatcaccgtcaaaccggaaatgggtacggaaatgctggactgcggcgcctcccgcgcctttgccgtggcggatcaccagactgcccatatctacatcaatgatccttccgtaaaagaagaagtaaaagcgttgctctccgccacccccggagtggaagaaatcagggaaacggacttctccggcctttcttccgcggctctggaacgcctgccggaattcaccgccgtcgcggcccccgacgcatggttcacctactattactggctggatgacaccaaggcgccggacttcgcccgctgcgtggacatccaccgcaaacccggctatgaccccgcggaaatgttctttgatccgggccttgccttccccatgttccatgccgccgcctttctgctgaaaaaaaagctggggttccgcgccctgatgaaagttatccccctcaatggcgaccaggtaaagggctcccatggcagagaccgggtgccagcgaaccagcagcccgtattcatcggcccggccttcctgccggaaattcatgctgctgaggatgtccatcaagccatcctctccgtctttgaaaaagaataatagcggttcccttcagcgggcatccggacgggggtcatattccaggccgggaacctcccggtaatgaatgccgtcccacaggacgggaatgcagcagaaaaaccagcttctctggccgtcgtctcccttccagtgcccgaacacgctgcggatcaatacacggttcaaccccttgcggagcttgatctttacaggagggcggaaaaaatacccttcccaggtcagaggggcttcctcaatgcgcccctttccccaccccgtccagggcaggctcttgaaaggccacctgggagggttcacgcgccttccgttcaaccatacgtccccgctggaaaaatcccagctttcctgttcaggggcgcgtgcgctgcggtacccgcctgaatgcccccacatgccgttcaggccaaacatcagccacacctcctgctccctggggctgcggatgaaagtcagggcataacaggttccatcgtcctttccaacctcccttgacatcagcgtaggccagtgatccgtccggtactggttccggtgcatgttgaacatcgcaaaaagatgcctgacatgtatggcggcgccgtaaacaggagtcttcttccaggccagtatcctgtccccgtccctgtaggaaggggctattcttctttccggttcaaaagaggtatcattcttcccccggtggtcgaatggctctaccaggctccaggcaacgtccgcctgtttcacataggcaaaaggaacgccttggaaaaaatgatcacgatggaaagccaaacgctgttcaaactcccggaattccttccagccgtccgttcccctggggggaagctgtgccatataatccctcctcttggtagcgcttccgcgccagacacgctctgcaaacgtcaatgcacaaggataaaacggatactgttccagcaccctcatctcactgctcaggtttccgtcgcaccacacgggcataatgacccccaacgccttatcatctccttgaggcacctcgcagggctgctggaaaaacacctggtacacgccggacagggaatccgcccagtcaatgtaaaaaccattgctgtcgatgcgcttcatattcttatccatcctggcgccggcctcgttctctccccagcacatcaatacggaatccttatcgtgcgggccgcccggagaccacacgaccacctccttgcccttcccgcggatatgctccgccatgcgcggaataaaatccttcatggaaatgtgcgcctcgtcggaccccatgtggaaaaacctcccgggaaacagggaaacggcctcgtccacgacatccttcaatatggaaacacccttctccgtctgcatgccggtcttcatggccctggaaaaaggctggctgtgtcccggcatgtcaatttccggaatcacctggatattcagccgggcgcaataatccgtcagatccttcaattgagcctgtgtataaaaccgccccgggagccgggacttccaatgaaaagccccatccgtcagggccggatacttcttcacttccagcctccatgcgggatcatccgtcaaatgaagatgcagcgtattaatcttatagcgggaaagacggcgcatcatctccttgatcaaggcaggagacatgtaataacgccccacatccagcataattccccgcaggacgaaagcgggtttgtcactaatccgcacaacaggcatggcaaattccccttctctattgaaaaccagttgccgcagcgtttgaagggcgttaaaaaaaccgccaaaacttcctgccctgacggttgcttttcccaatccgacggacaggtcatacccctctcctttcatcctggcatccggaaacaattcccatgtcatggcaccttcagcagcccccccactattcagggaaccctgaatgccggaagtcctgaatatgtccttgatctccttcatcaaatcatccctgccaggaacatccggaccaaccttcacatgaacactcctgaaacctgcctcgcccgcgcccctgacgactttggaaggatacggaataagcgcgggggaagaaaactccggcacaggcgcggtaaccacccctccggccagcggcccccatgaaaaataaatcagcaaggcaataaaaaaccgtacgggaatgctgaacactctgaacaaaagcattccttaactacggcattccatctccgctcctgtcaaaacagggctttctcaactgggaaaccaaatgcttttcccatcctctccaacaccgacatgcttgttcctccatatcactgtttccctccgcaaatccggcaacaacgaacgggcgtcttcgctattgtcccgttcattcgccagacagactcctcctgtcagtgcaaacgttccagcagggcatccatgtccatgtaatcctgcccgtgaatcaattcaccgagaatgggcgcatcggaaaactcctccaccatgctcctgttcgtcacgcaggcagtatcccattcatctttcacattattgaacacgatgcccaggcattccaggccgcgttccttgattgcattcagcgttaacagggcatggttgatggctcccagcttgttgccgatcaccagaagaacaggcagcttgaaatccgcagccatatcgctgaaattccttccggggccaatcgggacttcccatcctcccaccccttccaccaccacgcactcatgtgcggcggacaaagcgtcataagcccgcaggacaacctcttcatccacccgcgtattctccagccgtgcggccacatagggacacgtggcattcctcaaaaaaacgggattcaggtcatccagcgtcagctccttcggcccggcttcgcgcaaaaggcgggcatcctgcctgtctccgcaggccacgggcttgaatccggcggcattgatgcccgcttctcttagagacttgatgatcaggcagctcacataagttttaccgacttccgtatcggtaccggtaacaatgaaattcctcataacggtaaatattcagggatgggatcttctaatctcctcaagctgcccgcgggaaggcacgccgtcattcgtggtcacccagtgattgatgaaagaccagataatcacggccagaaccagacagaacaacttggcaggccaattaagcaatagcagttttttcattggaagaagaaatattcagcagctcttcaaggcgtcccttcaactgttccggagtcaggttgcgttccagcttcccgcctacggccaacgcgatagcccccgtctcctcggacaccaccaccaccacgcagtcgctctcctcggacatgcccacgcccgcgcggtggcgcagccccagggtacggtcgctcatttccttctgggaaacagggaacacgcaggcagccgcggaaatgcggtcgccggaaatcaccacgcccccatcgtgaagagccgtcttggtatggaaaatcgtcagggccagttccggagaaaaaatggcgtccagcttcacgccggaatcctcaataggcttcatgctgatgctcctctcaaaagcgaacagggcgccgaaccgctggttggaaagcttgcttaccgccttgcagaaattatccagaaaatccacccgctgaagcttggcgaaggaagaaaaaaacgggtggcttcccagctttgccagccccacgcgcagctccggctggaaaatcaccaccagagccagcgccaggccgggggcgaaaatgcgcgtcagtatccacgaaataacattcagctgaaagaaaaaggccagcaccaccaaggccagaaagcaggcgaacagccccaccatgatgcgcgcgccgcgcgttgcgtggaaagcacggtaaatctggtacaggaacacccacaggatgaaaatttcaacaaccgcccggagcgcatccttgatcactatccagtcccacatgcccaacaggctacacaacaacccggccgaatgcaataccgatcctttcgcgttgccggcaggctccgggaatttaccgttcatctcagttccccgaatttgaagacatctctgtacgttccggaaacaggtagaagttcttaaaaagaagagcggttctttgggaaataaataataacaataaataaaaattagattaaataaacaatgttaatccgcataaagcaaggcttcagaaaactgaaattctctctggatttacggcatgaacttgcggcggatacactgaaaaaccaaacaaaaaaataatcaccaaatgatagcaatcgaacaattaaaagaagtaggaaaaatctggctcgcctgggtaaggcttcaggatcatgatcctgccgaagtcacacaaatatttgaaaaacttaaaggagaactggatgtaaaattaggaagaggctggcaaaaatatgacccggtaataaaaaaaggaaggccccaatcctataaaaaactctttcaagaattggatagtgacagtcaggaatccgcaaatgcattgatccaatatttcaatgagggaataccggaagacgctcctgtctcgccagtcatacacctcattctcatcttatgcgtctgtgaagtaggacgtggatatggccaggcgccggacaatatgctggcttatgcacatgatctcattgattatcccaatctcacatggagctcactgctggacacagcgggaagttccccggagttcgcatttctatgcaagggtgattccgatgaagactataaggaataatgcatgagcgccgtccgcaaccgactcaccggtgagcctcccgcacggcatgggttccctgtatccgggcacagggaacttcacccccatcgtcggcaaaagggacagccgcaggcgggctcgggcaattcagaaacataggcggcccttcctgccttccatctgtctcaatcctgcggacatcaaaagttggtacatcaacttttctcatcacctcaatttccgggccaaaaacctggccgccgtcatgataacggacaccttccttttccggaaaccgaactgccatcaacaggaaaccttccggaaacgctggattaccgccgcatggggcagatgccccagagcgacaccaggccgtcctgcatctgacggcgggcatcaaataaaacgcaggcggcccctacgcccggcagcctcagacggcctgcccgtccataatcgtaataatgcggtcccctctccgtgccagatgttcgtcatgcgtcacaatcaccagcgttttgcgggactcgtccgccaggccgaacaaaaggtccagcacctccgcgccgttcttccggtccaggttcccggtaggttcatccgcaaaaataatgggggcgtcgttcgccagggcacgggcgattgccacgcgctgctgttccccgccgctcagttcgctgggcaggtggttcaggcggtgggacaaacccacgcgctccatcagttccctcacatattccacgcgcggcctcctgccgatggaggaagccagacaggcgttttccagcgccgtcaattccggcatcaacagataattctggaaaataaaccccatgctccggttccggaacacggaccgggccgtggcggacaaggcgtaaatatccgtgccgtcaatcgtgacctttccctcttgcggcgtttccaatccggccagcgtgtacatcagcgtggtctttccggccccgctgggcccgcacaggaacaccttctctccggcggcaatgtgcaaatccaccccatgcaggatctcaatggacttcttgccgatggaatagctgcggtggaggttggaggcggtaatcacgggcgcagtataagaaaatccttgccgtattaaagttctatgttgtctataagacgcacgtcgccgaaatagacggcggcggccatcagggccggcttccggttctccgccaccggctgcatggtctccgcatccacaatctccagataatcgatgcgcgtgccgggcacaccctcaatcatggcggcggcatgctccttcaccttggaggcgtccgccccggcctggaactcgtcccgggcctgaagcatagcctgccgtattaccacggcctgttccttctgctccggcgtcaggcgggcgttccgggaggaataggccagaccgttgccatgccttacaatctccgccccgtgaatgcgcaccggaaaatccaggtcgcgcaccatgcggcggataatggcaagctgctggtaatccttctttccgaaaatggcgtccgtgggctgtaccaggttgaacagtttggcaagcaccgtgcagacaccggaaaaatgccccgggcgggacgcaccgcacaatgttgcggacaaaaagctttcttccacggcaatgctgcgttctccggaatacatttcttcaggagcaggggaaaacacataatccacgcctgcaccttcgcacacctccaaatccttttcaggagtccggggataagtctgaaggtcggaggaattgttaaactggataggattgacgaaaatactggcaaccaccacgccatcctccccggccaacttgcgcgcctgttccagcaaagcgcggtgtccggcgtggagggcccccattgtggggacgagaaccacatggtcatgtttgcggtggtgcttgaggagggcagccctcaactgggccttggtggaaaatgtttgcatgcgcctaaagtggccccttgatgacaaaagttcaatcctgaaatattgctagaaggttgacgcatgccattccacatgtaaactggtaaagtcagaagacgctaaaaattatgagattcttcaaaacagcattaggtgtatcagcagcaatggcattaagcgccacggccaacgctgaacttaaggtagcgacggtggatgtgcagaaactctttgccgactactacaagacccatgaagcccaggcggaagtagacaaggctgcccagacggtgcaggaaaccaacaacacccgcgcggaaaccatcaaaaagatggaagcggacttcaacgacatggtcaaaaggcttcaggatcccatgctgaatgaaaaggacaaaaaggagctggagcaaaaggcccagatcaaacgtcaggaagtcattgcgctggaacaggaacgccgcggatttgtggaacgccagcttaaatcccttcaggaacaaatgaaagtgcgttccgccaaaatcatgggagaaatcacaaaaatcacggaaggcatcgccaccaagggcaactatgacctcgttctggacaaaagcgcccaggcccttcggtccaaccaggtattcgtctacacgaagcccggcatggacattactcccacagtgatgaaagaactcaacaaagacgcccccgaagggtttgacccctccaagaaaaaggctccggccgtccccgccgctcccgcggccccggccaactaacccttgacattaaccccgggaaggcggaatcatatacccatgaagcttacacttgaagccgtggccgccctcaccgggggaaaaatcctttccggcgaccccgaactgaccgtattcggggtcgcttcccttcttgacgcatcccgtgaagaagcctccttccttggcaatgaaaaatacttccaggacttcctgcacacctctgccggaatcgtgctggtgccgccgggtctgcctgcgtatccggaacacgccgccttcgtggaagtggacaacccctccatggcattcaacgccctggtgaaatatttcatggcttccgcctaccggttcacccccggcattcatcccacagccatcatcgaccccacggccagcttcaacccggacaaaatccatgtaggagcctatacctgcatcggggcccactgcataatcggagacgggacggacattggcaacggctgcgatatcggagacggcgtcaccatgggggaaaactgccgcctgcatgcccatgttaccatcagggaacgctgcaaactcggcaacagggtgaccatccagcccggagccgtcatcggttccgacggattcggcttcctgatgggagacaatggacgctacgtgggcattgaccaggtaggaattgtggaactgggggatgacgtggacgtaggggccaacacaactattgaccgcgccagattcgggcgcaccattgtgggggaaggcaccaaaatagacaacctgatccagctcggccataacgtcgttgtcggcaggcattgcatcatcgtcgcccaatccggcatagccggcagcaccaaagtgggggattatgccaccatcgccgcccaggtcggcatctcaggacacctcaacatcggttccaaatccacgctgggcgctaaaacgggagtcatctcggacattccggaaaactctacttactggggcatgccggctttcccctacaaggacgctacccgccaatatgccgccctcaaaaaacttccggcactgattaaggaagtccgcgcgctcaaaaaggagctggattcttccggcaaataacgggcaccatatcgccggaacgctctgcagcccctctccgtgtttctgttcccgccgcttcaggcctgtcctgtcccccagcggcggtgcagaaaccgttccagaggagaaaacagaatcttgtcggacagcagcccaatcaccacaatcacgaacatgatgcctacgacctggttcatcgcgttcagttcgcggccgaaatgcagcagctggcccaatccgaacccggtcaggatgggaacaaaaatttccgcagccatcagggagcgccaggcaaaagcccatccctgcttcattccgctcaccacaaacggggcggaagcgggaagcgtcacatgaatcaggcaataaatgggtcctgctcccatggtgcgcgccgcacgggcataaatgggcggcacgttccgcatgccgttggccgtagccaggattacggaccacagcgtccccataatcaccacgaacagcatagccccttccgtctggccgaaccacagggttgccaacggaacccagcacacgctgggcagagcctggaaccccagggaaaccagccccagagtattctgtataagctggaaacgggagcacagcatgcccaggggaatccccgtcaccaggccgattccataccccagcaccagccttttcatggtaatccatgaagcctcctccagagacccgtcctgaaatgaagagcgcagatactcccatacttccagcggagagggaaacaaataaggcttccagaccctcaggtcgctcaaatactgccatgcccagaccacgagaatgaaaaacacgagcgaacaggcgtgcgccccccacttggaccatttgttcctgttcatgctgtggctcctttcaaatcacgggtgatgcgggaggacaatgccgccaaatcactgctgttgatatccctgggatgagggaaatccacgaaatattcctcacagacgcgccccggatgcggagtgagcaacaccacgcgatcccccaggcacacggcctcgcgcatattatgcgtaacgaaaacaatcgtcatgccgcagcgtaaatgaatctcctgaatatcctgataaagctgttcgcgggtcatggcatccagggcggcaaaaggctcgtccatcagcaaaatgcgggggctggtagccagggcgcgggcaagcgccacgcgctgcttcattccgccggaaagttcatgaatatgagcatgggcacactctttcagccccaccagttccagattcttctccgccatggcaagccggtctccccgagtcagtccgggcaccagattcaagccgaacatcacgttccccatcacatccagccacggaaacagggcggactcctggaacatcacagtgcggtcccgtccgggtcccgtcacaggctccccgtccagctccaccaccccggaagaaggaaactccagccctgcaatgatattcagcagggaagtcttcccgcagccgctggcccccaccaggcacacgaactcgcctcctctgatattcaaattaatgccctccagagccaccacctttccgcgcctcccgtcaaacaccttgctcacgccggcaatacggagcttgcagcctccggggccgcaatgttctgcacccgcaatcatcttccgcccgcctccttcgccatggtcaactgttcctccgccgcctccggcaccaccaggccgcctatatccggaacttctttcataaatccggcctgatgggcgtcctgcacaaactgccggagcttgggaatggaaatcctgtccttgatgacaatgcttttccaggcctccgcaatcaatgccgggtctattctggaatgcatcagctcctccagctccctgaccacgattaactgggcctcatccggatgcagccttatccattcgttcagttcctcatgcgcctgcaccagggctttcgccacctccggcttttccctgagaaactccgctccgcataccagtacggtcgcgatggactccttctcgtccaccagcaccctgcctcccgccgtcagcaccaggcggctcacccagggttccaccgtccacacgccgtccagcttgccctgccggaacaggctgagctgttcggggttgggagtcggcagaatcgtcacgtccccgccgcgctgcgtcacatgcaggccgccgcgggaaaaccaggcgcgggcggaaacatcctgcgtattccccagttggggagtagcaatcaccttgccgcggaaatccgcaggctccttcagcgaagaatccttcggaaccaccagggcggcgcctccttccacagctccggcaatcatcctgatatcctccccgcgggaacgcacaaacgcattgatggccgggctgggccccacataagccagttcaatggaccgggcgaacacggcttccatggcgctggggcccgcattgtacacgtaccagttgatcctgacatcctttccggtagcctccttcagccgttcttcaaaccaccccttcccctgccgggaaaaatgatgcgccaccaggccctgcacatgtgtcacgttgggaaaatgaccgaaattcaactctacgacattgggatcttccttctccttctttccgcaggaaacagccagcaggcaaaaaaacagggccggtaaaatcgtcaggaatctggaacgggacataagcaaaaagaatggaatactgaggcacagccgtttttccgcggcctttcaggcaccgactagcagaagaagccgcccgaggcaagaagccgaaggcaacaactttgtcacaatgtggacagcaaaaatgcccgttttgttgaaaaacaatcccgatcccggatctgaaccgggctttattgacaaacctgcacgttcccgttacaaaagcaccattcccaacccgccatgcaatcctcccccgaccagccctcatccggagcatggctgggccttcctccggatgaagaacgcccggtaagccggagcgtcaggtaccgttgcatatttctaatgctcctgtattggtccgttctttccgccattccccaaggcgcggaccgccttgcagagataggaacaaatctccctctctggatgggagccctggaactgactcccttcctgctggtgccggccttcctgttcctggcggtgcgaacaggagcccaatggagagccttgatgataaccgtatatgcgggactgttcctgaacctgctgatgaacatggcgcttccctcaggcgccatgtggggcgaccttcccgcagccggcccctacggtacgcttgtctggcccggagaggaccaccgggaatggctggtcacgctgccccgttttcctcaattctgggctctcgtcatctatgtcttcctctccggcagcggaacccctcccctgcttcgcctgctggccctggcctggtggttcctgctttgcgtggcccccgtgaacacgggcatggtggggtatgcggacatcctggggcctctggtcatcatcgcccttgtcctcggctgcatgcacctggcggaaaaaagagcctcccggcaaaccaagggctaacaatccagggcggccattccacggaagaaacagccgccccagggccagaggacaccaccctgcggaaaacttcccagcgccatccgttatttccagactacttcaaaaatatttacggaacttcccttcttcccggtcaggccgagggccctcaccggctttttgacggatttcaggctgaacgtattaactttcctgcccttggccagattgcccacgggaacccaccgtccgtcagccccacaggccagcacggaagcctccttcccgtcggacaggacaatgacggaacccgcacggggaaaatcacagggaatctccgccctctccggagacagctccacctggaggaacgttgccaggttgaaatccccggcagctccgctgtcggcggacttcccacccttgttggcaagattcagccggaactcttccagagtcacctcctgcggggaggaggaggcgttcaacagcctgatgcccttgatcactccgccaatatccgcggaaccgtcctccttcaacggaacctccgcccaggactttccatccatggaaatgaacaacttggcccacttcatatccggcgtcttcaaattgacggaggcggactccacggacgctcccgccggaatttgaaggcccagggactttttcggcggcaggggatgcacctccatgatgcgcttcagggaaatatccctgtctcctgcttcaaccacggcattcctgaacgcgggagcatccgtcagtacggaaggcgctgcaggagcattcaccttgaaatcccggatggccgtccacacgtccggcttgcctcccggaaccccctgcgccgtagcgcggtaacgcacaaaccggccttttttgccatttccccggtactccacgcgcagcccgctggactccggcatcaggggagaccaggactgcccgtccagggaaacctccaactgtcccctgttcacagcgtccgtatcggaatcattgcggcccatcacaatggaaacggtgcgtatctcccgtggaactcccaggtccacgccgaaaaagtcacccttcttctgaacctctttgcagtaatagaacgactcggggtcgtcatccagcatcttctcgatgccaatcttggacttggtggaaacataaggcttcacacggccaacggcctgcccgctcacgcgggaaagcacgggggtggagcccatgtccagcagttcccgcacagcgggggccatcaccagttcggacggcttcacggcggtttgccacggggaattcttcttggtcacttccgtgacgtgcttattgatggccttgctgatttccctgctgtaacgctgcatctcggcaagcaggcaggcggcctccatggcatgattcagcgctccggcggcattccccgcctctgtggcctcaaccatgcgcatactgttcaccccggctttccccagggattcgaactggatgagccacggctccacctctgcaacgaaagcgggattattagacttggcccgaatcgcggccggagcttgggctatcttcgcgaactcggccttcaggcgatcaaacgccttgcttccagacaccctggccccgcggcggcacagctccagcacctgctccaccacgggggcaatctctacggactcctctttgcggtaattgtgcccgctgggccccccgtcgctattatgatcggaaaacgtctgcatggcggaggagcagccggggaacaaaatacggatactgtccttccatgtcctgtcggaatcataggccttggcgttccaagtcatgttcgccacgctgaacagggaaatcttggaagcctccggcttatccatcggattggaagcaaacccctgcataaacggcatcgcgtccgcatccacgccataggtgcgccccaaaaacagggcatggcgcacgtaatccgtcaccgggaaattccaccagataaacgccggacgcttcaaatacttattaatccccttcaaagcaggagtccggatatcgctcacaatgctggaaccggtccacatgatgcctatatccttgtccagatgttcccccattacctcatggtagcggctaccaccgccggaatacgccgtggggcatacgatcaacggcgtcacatccggttttttgtggataaactccttattcaggtaattcaaaaactccacctggccctccggtttggccccctctccgccgatgtcgtcaaaaaatacggcaaaggaacggaatcccagatcatacatcatctcaaacttcttcacggccgccttccggtccgcctcgccccagtgaatatccgctccgggatgcacggcccagacaaaattcaccttattctgcttcgcgaccttcactagctctttcaggtccttcgccatatctgcgggataaggctcgcgccagcgcttggaaaaaccgtggaacacgtcatccttcgggccgtagatgtaagtattcatcttatacttcccgtaaaatttgaactggctgatgcgaccttcctgcccccagggcagaccgtaaaacccttcaatggtaccgcggaaaggaacatccggccaatccaagacctccacttccggcactgtcacgccggaagaagtcttctccgccaactgcaacagcgtctgggccgcgtaaaacaggccttcgtcgtcataccccgtcatccgtattccctggggcgtaacgctcagggaataggccccggccttccggggaacattaccggcaggctttttgcttcctttgatgatagtcatctgcacaggcagcccgtttggagcgagggaaaacatgcttttcagggcattcacggtaggttcatcccgcgcgcccaacagcttcagggccggaaccgtcacggaaccaccgctcctggtcatcttctgcggaatgggatacaccggcatcttggccgtttttccggcacgggagccttcaggagaggcggaaaaagccggagaagaagactgggcagaaacaggaagggcaaggccggcccccagcgcggcggcagccatcatggattggaaaagtatcagattcatacgtgcaaaaataaaaagcctgtacaggccaggttcacgagactacggccggattgttccacttctaacaggctcctctccgtatgtcaaaatactttgccccgcaccggtaccatgtcgcccgccccgctgcaggggataactccagggacaaaccgcagtgattttccccaagcaactattcccggcctacagccttgccgccacttcctccaacgtctccacacgggccgtggcgagggtgggaacatcttccgcagaaaacaggaaattgcggcctactccggcggcaagagccgcccggatgtcccgctcccggtcacctacggacacgcaggctttcatatccagcccatgcgcggcggcagccttcaaaaacaggccgggattcggtttccggtcgggatgtccgtcatccgcgctgggacagtgaaacacacctgcaatctccgcaccggacgaacggaacacccctctcatatattccgtcaaccgctcaaagtcatcttcagaaaacatgccgcgtcctatgccggactggttggtcgccaccagcaccagataccccttctctttagcctggcagcaaagattcagaattccgggaaccagccggaagtcctctatgcggtgcacatacccgccatccacattaaccacgccgtccctgtccagaaacaaagccttacccgccatatatctcccgttcaaccagttcgcaaaccagatgccccactgcaatgtgcatctcctgaatgttgttcgtggcatcggaaggaacggcaatgcaaaactccgcaacttctttcatctctccgcctccgcggcctgtcaaggccaccgtccggacgcccatccggcgcgccagctccatcgccaaaacgatgttccggctgttgccgctcgtggaaagccccaccagcagatctccgggacggcccactccctccagctgcctggaaaacaccgtctcataaccgtaatcattgcccacggcggtcaggatggaagtatccaccgtcagggccagcgcattcatggcggggcggttcagcttgtaacgccccaccaattcggcggccaggtgctgggaatccgcagcggagcctccgttgccgcagaacatgatcttattcccggccttaagggtatccgtacaaatgcgggcaacctgttcaatatccccggccatggaagccagggctttgaaattgtccgctatccctaaaatctggttcctgatgtattcgctcattccgggctgcttttcatgcggttgatgatattggtggaggaaaaaccctccaggcggggcagttcaagagcctgccctccataagatttcacgaactgtccttccggccagcattccaagggatacccttctttggcaatcacgtccggacgcagcttctcaatcagaggcagagccgtatcttcatcaaacggcactacataatcgacaaaatccagggatgccagcaacagggaacgcatctcctcattattaatcggcctgtcctcgcccttcagccgcttgatggaggcgtccgtattcaaccctacgaaaagcacgtcgcacgcttcacgcgccttcataaaggaatgcagatgccccaggtggagcaaatcaaaacaaccgtttgtaaatccaaccaccttcttctcacggcggaaacgttccgccagctccgccgcggcctccggcgtcaggatattgtcgcggtgacgccaggagggcgtctggatatccttctccttcaacgcctccttcaattccgttccggtcacgctggccgttccgaacttgcccactacgatgccggcggccacattggacacgaccagagcatccggcaccgcggctccggcggccagcgccgcgcccagactggcgagggaggtatcacccgcaccggacacgtcaaaaacatcccgggcctccgtaggaatgcagacaaaatcggaagggctggaggaaggaatgaaaatcataccgtgttcgctcaaagtgacaatcagattctcaatgccgaattcggaaaacagcctctgcgcccccgccacggcatcctgttcccacccgtccatggcaggattgagcgccacgccggtagcctcctggaactccttcatattgggtttcaccagcgtggcccgcctgtagcgggaataatccgctcccttcgggtccacaatgacgggcttgcgcgccgcacggcaccgggcaatcacatccggggcggttcgtccgtcaaacaggcctttcccgtaatcggacaaaaggacaagatccgcctccggcaaacaggcatccactcgttcaaaaaaacgggaagccagctccggctccatcctcagcggctgttcctggtccgctctcagcaaatggtgcttgcccgccacaaaacggatcttcacggtcgtctcgtacccttcgcactccaccagctccggaacgcagtgcgtctcttccagaaaacgccttacctgccgcccatggccatcatccccgaccacgctgataaaagtggtgcggcatcccagcgcgcacagattggacacgacattgcccgcgcctcccagcatgcgcgtctcccggtccatcttcatgatgggaaccggagcctccggcgaaatacggctgacgctcccatacaggaacttatccagcatcacgtccccgatgcagagaatccgcacccgggaaaatccgtcaatcaatgtatgcagccggttcatgggagacgcctctttctaccacgccccctgttataaggcaaggacagttgaaccgcgctccggaaccggaaaacggggcaacgcagccgcttcccgccgttccggacggcagaactctcattcagtggcaaaaaataggtcagtcatgataaaaatcttgacctgtaagcaggaaagcactacctattgtctcccgttcccggacgaatagaaaaaggaaaacaaatcatgcgtgaagttaccgtaagaaaaggtgaacctatcgaccgcgctctcaagcgcctcaaaacaaaactggatgttgaaggcattctggatgaaatgcgccgccgccgcgcctttgaaaccccgatggacgaacgccgccgcaaggcccgttccgccagcaagcgcaacaaggtaaaatggcgttacagcaacaagagcgaagaaaccgcttccgaaactgctgaaacacccgcttccgctcctgaagcttaaaacagtattggttcgggaataagaacccaatttccatgagggcaaccctttctcaaggattgccctttttgcttccctctgcacatgaatcagtcagcccagctcttctcccgcgcgcgctccgttatccccggcggagtcaactcccccgtcagggccttccgcaatgtggacggggaccccttctttgttcaatccgccaaaggagcctacatcacggatgcggacgggcgccagcttattgactacataggcacatggggcccggccatcctgggccacgctccgcaacccgttctggacgcagtacatgccgccgtggacagggggctgggctatggaattcctgcgccggcggaagtggatatggcagaaatgatcacggacatggttccctccgtggaaaaagtgcgcatggtcaactccggaacggaagcaaccatgtccgccatcaggctggctcgcggctataccggacgccgtaaaatcattaaattcatcggctgctaccacggccatgtggactcccttctggtggcggcgggttccggagcgctcaccttcggagaaccggacagcgcgggcgtgcccagggaaatgacgcagctcaccctcaccgtgccctacaatgaccgggaagcagtaaaaaaagcctttgaactccatggaagcgacattgccgccgtcatcctggaaccctttcctgccaatgccgggctctactttccgcaaaatgacttccttcacttcctgcgggaaataacgctccgccacgacgcccttctcatctttgatgaagtcatgacaggcttccgggtcgctcccggaggcgtgcagcagctttacggcatcactccagaccttacctgcatgggcaaagtcatcggcggaggcctccccgtgggagcttttggcggccgttcggaaatcatggactgcctctctccgcttggccccgtgtatcaggcgggaaccctgtccggcaatcccgttgccatggcggcgggattggcccagctccgggaactcctggaagggaacgcctatgaacgcctggaacagctcggagcgcgcatggaagaaggcatccgcgaagccctcaaaaaacacggcagaaattacaccttccaccgtgcgggctccatgttctgcctcttcttcacggaagaggaagtctataatctggaatccgcgcaaaaagcttccaaaaaactcttcaaatccttcttctggaacatgctggaacaaggcgtctatttcgcgccttccccgtacgaaacgggctttatctctacagcccatacggaagaagacattgaccgcacggtggaagccgtccgcatcagtctctccaggctgggttgacatgcccctgatttgaagtgacagctcacggcccttcccctataaggacttcatgagacaaatgacaggaaccatgctgcttctgtcctcagcagtcgttatggccgctccttgggcgcatgcggaggaaaagacaatccagctcacggaagcggaacaacaggaaatcaagacggcaaacgaaaagctgctgggccttaccctccgtttcctgcatgactcctggccgctggaaatcatgtttcccggagaagtgcaggaggaattccactccattcttcaatgccatcagatgctggagcaattccgccaaaccggcaacctcctgctccagacgccggaccgtaccacgcctctgcacctctgcattgccctgggattaaaccggctggccgtccggatggtagaagcgggcgctcccgtcaatgctcaatccattttcatgcatgacggcacaaaagagccgggagacaccccccttacctgggcgtgcctctcaggcctctatatgaattccaccgcggaagaaaggctgccgctggtgcacgccctgctcaaacacggcgccgatccggatcagccggggccttggggcgtcaccccgttcatgtattccgccgccctcaatgactccgatccgggtcaggaaaaaatagcgctggcgctcctggacgccggctccccggatctcaagcgcagaatgaacgctcaggcgcgcggagtcggcttcctcagtctgtcccccgccatttacgaacggctcatcaaagccggctgcgatgttaacgaacgcttttttgaaagcaagcaatcacccctccacctggtctgcaccaaggaaaaaccggcggaacgcctcattcctctcattgaacttctcatcaacgcgggagcggatcccaaccagccggacgtggatggcctgactccgctgatggcctgcaactctccggaaatagccgtttgcctcatgaatcacggcgccaatccctctctccgcaacgatgacggccagacagcctatgacttccatatgaaaaacgggtatccccccattgcggaagccatcaagcactggcagtccaagcagaaaaaaggggaaacccgctaaatagcggatgccatcgtgggctttgcagccctccttctcccactggtgcgggaaagaaaagcggataccgtcacggcccgggaacaggcggccggaaccctctccctggaacagccgtgcttccgaagccatgcaggcagcccaccctgtttcctgttataaaaaagccgcttccccaattcaggggaagcggccttgaaaaccacaggaagaaagaattattcctctgcttctatgccttcgccgatcatcttgggatcttccggcatcttgcctgttgtgaagtaaccttcaatttcctccagggaacgtcccttggtttcaggcaggaagaaggtcaccgtaatgaaatacagcaccgtaatgccgcccagcgtaaagaacacgccggaataaccgcagctgcccacccacgggaggaaggaaccggcgataaccgtggaaaccagctggttgatcaacagagcaatcgccataccgttggagcggatgcgggcaggcatcagctcggacagcgccagccagacgcacacgccggggccggtagcataaaaagcaatgaagataatgaagaacgcagtcacgccccagcccatggaggtatccggcttttcgcccaattccgccttcagaatggaaacgggcttcatggcatagccgtccttgccgttcaccaccattttattggtggaatccggaacggccttgatcacggccagggaagccttgtcctcttccttcttgatatccttggtatccttggtcagttcggaaaactctacgacggaaagctgggtggaagaccccatcaggaactggtaccaggcgggattggcttccggctggtcataggtgatgatgagctgcatcctgttgatgtccttgtcggccatgccgttcttggcaagaagattcctgatgaagggggaatccggagtacgttccaattgaagcgttcggatggaacccacatccttgccctgttcaaactccttctggacggaagggctctgggcggccagcagggcagccacatccgcagtcacatccttgcgggctttttccacattattgaacaggaacccggtgccgagaaggccgaccacgatgccggccgttccgattttaagcaggaacttgcggcccttgcgatccaccagcaccatggcgacaatagtcatcaagcagttcacgaccttgatggtaaagtctgcccagttggcggtggtgccttccaggcctgcctgctggaataccttcacggaataattcagcacggaattaatgcccgtagcctgcgtaaacgccagaacgagcaccgccagaacaaagggatagatatacttgcgctgaagaagggactcgccggaagagctctgctttttgagttcctccgccttctgcttctcttcctcttcaatgtggaccatttcatcaaacacttccttggcgcgggcatccccgtaactgcgcaccagcacagccatggcttcatccttgcggccgcggcggaacaggtagcggggagattcgctcaaacggaaggaaccgaaaaacaggaacaggccgggaatggcgcaaacccagaaaatagcctgccaggccagaaccttggcggaagtcagcgattcttcgctcgcgccggaattctcgacgccgcccacataactggcggcaagcaaaccgacgacggcggcaaacaccaggcccaccgtcagcaggaactggaacatccccgttcccttgccgcgggactcggcgctcaggcactcggccagatacagcggaacgaccacgcccacaataccggcactggcgccctgaagaatacggcccagcaacataatgccgaatacttcctgggacaggcagatcacggggatgctcgccgtgaataaggctgcggccacggtaatcaacgccttgcgtcccatcttgtcggccagatagcccgcaaacagggaagaaagaacgctgccgaacagcacggcggccaccacctgggaaagctgggagggattaaaaccggccgtctgttcaatgtagggaagcgcggcagcaatcacgccaacgtccacaccgtagagcaggccgcccaaaccggccatgatgaggagatagcgcatatatcgcctggccgcatccggaacggcggctttcatgttttcttggtctgtcatggtcgttgcattctagtaaattggctcttctccgcaaccaaaaaagacacttcccgggcaaaaacaaatttcctacccggaaatgcgttcaaatggtgaaaatatcgcaaaagaaacaagtaacaaactgtccgaaaacaggaaatcatttggacacctctgcaaaaaagccctcatgcatcccccggctccgaaaaacagccatgggaaaattccggagccgcacttcaatccccgtaaaccgtccggaaaaaactccccttccgtattggagccagaaaaacagcgcgatgcgccatcacggaaacggaagccgcccttaccggcctcatctggcggaagaatctatcccaagccgcttttcaatcaggttcacagacaactccgcgcacaggcgcaattcgttatcggcgtcatgagtgaaagccttaagcgcggacagggaagcttccgaaccgatttccccaagaatgcgggcggcggaacgtttcaaaacaaaatcgtccgactcattcagcgaacggatgatatcagcttctcccgttgggccggctgccttgcattcgtcctcccacttctggggatcctttttccattcctccagaagcaacgccaaacttctcttttccgaaccatgcagtaaaaacctgatcagagacgccggaatttcgcaatccgccttcttcagctccgtagccacgtaatcaaccacgcgctgagcctcctcatgatccggttccgcccataccacaagggccgaagccaacgcggtcacatattccgcatcacgcccccacggttcccggagaagctccaccagcctggaagaaacctcacctcgcatcttatccggattcacagccgacaaacgttttgcagcggcaataacgcgacggatgtccagacaggacagctccttcaaattggccagcacgaaatactggtggcgctcatcctgcaacgcggcggaagcgggccgcgcttcaaacctgtcccggttcagaatcacttccacaaaaaaacgctccttatcctgcagggacaccttccccatcttgcccgcaacctctacaaattccttaaacgtaatgggagtgggagtaataacgaacagtccgccgcccgttcccttgcggtcataaaaaataggttcgtcctcggactgggtcatcctcttcaaatacgcctttaccatatcccggttggctgcattcaccccaaccacccatacgcccagaaccccctgggattccttgcggtcaatagcggaaaacagaggtttcaaatcaccgtccccataattctggacagaagcgttcttggagggcagctgctccagccccatgctggtaaagccggagacatcttcttccccggcgctcccctcttcatgacctccgagcagggaaggattcaccttgaccggatacacgaaaggcagggaagcaatcccccctgcaaccagcaaccccagcaaaatgaaaacaatcttgtgcctgcgtccagcacaggccatcaagcctccggcaagacaggcaaaaaacagggcaaacgccttctgctggggctgctgcagcatggaaaggaaaaaggtcccatccatctcggaagaagcattgtaaaaaatccagacgcagccggcggcaacagccagagacgcgcaaaggcacaccaattgaatcagccccgtttccaccagggcgctctgaatggcttccctcctgtctttgggggaatggacggaaacggctttcttcgctttggcaaaaggtttcttaggaatcagtttttccctgtcgcaaagaaattcatgcccgcatttgctgcaattcaccatagaaccctccgcggaagaaggcacattgatatgtcgtttgcactgtggacaattcagattcaccgggctccaatatgcacgtttttcattcttttgcaatacctgtcttcccaactttcctcttaccatgtaccccgcgaaaatatgcaagaaacttccatcggctcctatttccatcatttctccttttcatttcgactctctgatttttttctgaatgtaaaaactcgctcaaaccgctctcattgaaaataacatttaatcgaaaaccattccgcaaacttcggaaaacaaggtaaagggaaaattcccatcttcccctggcgaaaagctggaaatttttcagtctcccttatcaggggctcaatttccaaacgcaccttgatataaattatttgaattttacaacacgggccattggaaaaagataaaaacgctcttcatgctcctcttcccgcctcacgtcattccgagtgaacacgcttgcagaagaggaaatttggtagtagaattttcgccatgtcattgcagcctgccgaacgccgagatttcatccgcgatatgatttctgatgaccttgcctccggcaagcatcaggccccggtaacacgctttcccccggaacccaatgggtatcttcatatcggacatgccaaatcaatctgcctcaacttcggcatcgcccaggaatttccgggtgcgcgctgccatctgcgttttgacgacaccaaccccagcaaggaagaccaggaatatgtggacagcattcaggaagacatccgctggctgggctttgactggggcgataaccttttctttgccagcaacatgttcgacttcttttacgaatgcgccgtttccctcatccgcaagggattggcctacgtagacgaacaaacggtggaggaaatacgcgcccagcggggcaacgtgaacgtgcccggacaggaatcaccctaccgcaaccgctccgtggaagaaaacctggcacgcttccaggccatgaaaaacggagaaatcccggaaggcagagccatcctgcgagccaggatagacatggcctccagcaacatgaacatgcgggaccccgtgttgtaccgcatcatgttcgcggaacaccacaacacgggcagttcctggtgcatttaccccatgtatgacttcgcccacccgctggaagatgcctacgaacacatcacccattccctctgcacgctggaatttgaaaaccaccgccccctctatgactgggtcattgaaaactgccccgtcccggcacgcccgcgccagacggaattcgcccgcctgaaccttacctacaccgtcatgagcaagcgcaagctgctgcaactggtgcaggaaggacacgtctccggctgggacgatccacggatgcccaccgtctccggcatgcgccgccggggctacactcctgccgccatccgcaacttctgccacaccataggcatcactaaattcaacggcttcacagatgtggccctgctggaatacagcgtaagggaagacctgaatgccaacgcgccgcgccgcatggccgtgctcaatcccctcaaggtcactatcaccaccctgccggaaaacgcggaagaaatggctgaagtgctgaacaatccggaaaaaccggaagagggcgtccgccgcctccccatcacaagggaagtctggattgaacgggacgacttcatgctggaccctcctaaaaaatacttccgtctggcccccggccgcaccgtacgcctccgggggggctactgcatcacctgcacggactacaagcaggatgcggagggaactatcacggaaatcttctgcgaacacattcccggcaccatcggctccaaccctccggaaggaatccagtgtcgcgccgccattcactgggtaagcaccaaatacgcggtggacggagaaatccgcatctatgaccgcctttttacggaagaaaacccggacgctgctgaagaagggttcctgtccgtcatgaatccctcatcgctgaccgtcatcacaaacgccaagctggaaccctccctggccggagccgaaccagaattccgctgccagttcgaacgtctcggctactttgtggcggaccgcagggaccatgtaccgggccgtcgtcctgttttcaaccgcacggtggctctcaaggactcctgggcaaaaaaacaaaaataacctctcttcatccccttttatggacaatcaacttcaattctgcaccgttgaagaagcagtggaagaaatacggcagggacggatgatcatcgttacggacgaccctgggcgtgaaaatgaggcagacttgatcattgccgccgaattcgccacgccggaagccatcaacttcatggttacccacgccaggggcctcgtctgcgcacctctttcaccggaacgggcggacgccctccaactcccgctcatgacctccgtcaaccgggaaaacatgtccacagcgttcaccgtctccgtggatgcggcccatgacatcactacgggcatcagcgccgcggaacgctccctcaccattcgcacgctggcggaccccaaagccaccgtcaacgactttgttcagccgggtcacacattccctctccgcgccgttcccggcggagtgctgcgccgcgccggccatacggaagccaccattgacctcgtgcgcatggcaggcctccagcccgccggcgtctgctgtgaaatcatgaaggaagacgggaccatggcccgcatcggggacttgggaggattccagaaaaaacatggtctgaaagcctgcaccgtagcccagctcattgaataccgccgggccaaggaaaagcaaatccggctggtggaaaccgtcaacatgcccacagactacggtgactttacctgccgcctctatgaatcccagctggacggtgctctccacctggccctggttcacggggaaatctccccggacaaacccacgctggtgcgcgtgcatagtgaatgcctgacgggtgatgtcttcggctcccgccgctgcgactgcggcagccagttgcacaccgccatgcgccgcatcgcccaggaaggaggcgtcctgctctacctgcggcaggaaggccgaggcatcggcctggcggcgaaactcaaggcttacaaacttcaggaacagggtctggataccgtggaagccaacctcaagctcggctatccggacgacctgcgcgactatggaatcggcgcgcaaatcctgcatgacctgggagcaaaccagttgcgtctgcttaccaacaacccgcggaaaatcgtggggctggagggctttggcataaaaatcacggaacaggttcctctcatcatcccacccaacgaacaaaacagcaaatacctggctaccaaaaaatgcaagctgggccacatcctgtaactttccactccatcccttcatgtccacggaacttccccgccgccagcgcgccacgggcacgcgcgccaaaatctgcatcgtcgcctcggaatacaacgaacaatacacccaggccctggtagaaaactgctcggaagaactgaaaaccgtgcttccctcggtccgcctggaaatcatccgcgtaccgggagcctttgaaattccggtgtccattaaatccgttctctcccgctctccggaaaaacgtcctgatgccgtggtggctctgggggtcatcctgcgcggcagcacagaccacgcggacctgatcggctccaccattacccaggccctgatgcagctcgccctggaattcaccacccccgtcattcatgaagtcctgctgctgaatgatgaaaagcaggccttcgcccgctgtatcgcctctcagctcaaccgcggccgtgaagcggcccgcaccgctgcccgcatggcggaactcttcctcaactccctgctccggcaataatacctattactctctcttctctatcgccatgctctcacgcaaccaaatcagacaagccgccctccaatacctttacgccgcctcccagacgccggaaacggaacaggagggaatctgggatatcctgatggaacctttccggggagactactgcaaactcaaggccaaggccgtctccggccacctgacaagggactatccggacaagctgcgcctcttcatcacccgtgcgcgggaaacggcggacaaactgcagcaagaccctcttaccctgcccgtccgcgaccagcttcaggacctgctgaccaaggaaggagaattcaacgccgccctgctccggctgaaaaaagccctgcacgaagaccccgccaatgacaagggttcgctttccgccgcctgcgacgccgcccaggaactcaataccgcgctgatgcagatgcgccgccgcctgctggacacgctcaaggacttcccagcctacaacgcaatctggccctccctcatttcctcctgcaggaaactccaggaaatcaatgaccgcatcaactgcctcatccacccggacgaccgcccctccctggcggaaataaaaaaagtggtggaggcaggacgggatgcggatgaactctaccgggaagccaaaaccctgggggaagacatcctgcgccgccgggacgggttggacgccgccatcgactccacgttggaaaactactccccggaacgcgtcagcgccattgaccgcgccatcctgcgcctgggcgcctatgaactccttcatcgcaaagacctcccggctcccatcgtcatctcggaggccatccgcctgtcggaacgcttctcctcagcggaatccccccgcttcgtcaacggcgtcctggccggaatctcaaaaacggaacacccggcataactccgcttcgcgccatggcaggattctttaaaaaactattcaccaaattctcccgaagctcccggatagactgggaagaactggaagctgagctggtagccgcggacatcggcatcaggcgcgccatgggtattgcggaccagctgaaggaaagcaaaggcctggatgcggaaaatctggtggaatccacccgtgaagtgctccgccgggcctttccttccaccgctccgtccctgcccgtccctccggaaggcaaaccgctggtcattctggtcgtgggcgtcaacggcaccgggaaaactacttctgcggtcaaattggcccatttgctgcaaaaacagggctcccgcgtccttctggctgcggcggacacttttcgcgcggccgccgtggaacagcttcaaagctgggcggacaagctgaatatccccatctgcaagggagcacccggccaggatccggcctccgtctgctatgaggcccatacgcaggccatcagggaaggcttccaatacctcatttgcgataccgcggggcgcctccatacgcgccacaacctcatggaggaactctccaaaattcgccggactctcgcaaagcaggatgcatccgccccccacagcaccctgctggtagtggatgccactacaggcgctaacgccctggcacaagccagggaatttcataaagcaacgcccctggactccgtcattatcaccaaaatggacggttccggaaagggaggcgtggccgtagccatcatggatgaaatgcacatttccccctcctttctgggaacgggggaaggagccgaagactttgaacccttcaaccgggaccgctacgtggattccctgctgtaacgggaccgcctcaaatccatgccaccgcttcccctcatcaccgcccagacggaggaaaagctgctcgccttcctgacggaacatgggcacaccaaattccgcacccagcaggttctggactgggtgtggcgcaagcgcgtcaccacctttgacgcgatgagcaacctcccccccgcgctcaaaaatctgctggcggaaaatttccgtttccacacgccggaaattgtggaaatccacggctctgcggacaccacacggaaattcctcaccagaatggaagacggcagcctggtagaatccgtcatcatccctgccgcagcagcggaaaatggagaaaaatcggagcgcgtcaccctttgcgtttcttcccaggtaggctgtgccttcggctgcaaattctgcgcttccgggctgctgggccttaaacgccacctcaccacgggggaaatcatcgggcagattctctccgcggaagccatcgcgggaaaacgggtcaacaacatcgtcttcatgggcatgggggaacccctttccaattttgacaacgtggtggatgccctggaaatcatcacttcccaccgcggtttggaaataggggcgcgccacatcaccatctccacgtcgggattcgtgcccggcctgaaaaaactggcggcctatcccaggcaaatccgtctggccgtttccctgcacggagccacggacgaagttcgcgaccaaatcatgccggtcaacaaaaaatggccgctctcccagctcattccggcccttgaagaatggagcaggggaagaaaccagatgcccacgctggaatacatcctcatccgggacatcaacgactctccgaaagacgcgtcccatctcgtccggctcgccaaacgcctgcacgccaaagtcaatctcatcccgtacaacaccgtggaggggcttccgtggaaacgcccttcggaagaacgctgccgttccttccgggatgcagttcacaaggcgcgcatccccgttaccatgcggtatgaaaaaggtcatgacatcaacgccgcctgcgggcagctgaggctgaggaaagaacaggaaaagaacggatggacgccccgttgacggaacggggcttttccgaatttgcaacgttgcctattgcccggctccctccgttgtgctatccttcccggccggatgccacccatccagccgcctcaccatggaaactacgacaaccaccactgccgttcccccgctggaactgaccagggccccccgcaaaaccccgtccctggacctcagggacattccgcaggctcccggcccggaaaaaggagtgctggccctcatgaccatggacccggccacttacgtggggcagtgcgtgaccatcggcatgacggaggactacttctacctccccgcgcacaagctgctctggcgccttttccaggcccgctataacaaaaacgaacccattgacatcgtttccatcacccaggctttggaagacatgcaccagctggaagccgtaggcggaagcgcgggcctggcggaaatatacacctttaccaccaccggagcctattttgagcattacctcaatgtcctgaaggacaaattcatcctccgctccatcattgacatcgccaaccagtccaccacgcaggcctttgacaatccggacgacgtagcggaactgctggattctgtggaaacccatattttccagatacgggaacgctataacagcgccaaggatgaacaaagcctggccagcatccttaaacaggccgtcaccaattttgaaaaatttatcgcaagcaaaggccaaatccagggactgaccacgggatttgaggaactggacaaaaaaagcaacgggcttaaaccgggggacatgttcatcatcgccgcccgtccctccatgggtaaaacctccttcctgctcaacatcattgagcacatcgcgcttaacgaaaaaaagcctactctgctcttttcctgtgaaatgcccgcagtccagattgtggaacgccttcttttcgcccgttccggagtccgcagccgggaaatcatcaagagaggcaacctcacccagcttgaaatgaagcacttcaaacaggccgtcaaggaagtgggggcttcccagcttgtcattgacgataccgcagccatctccatcaacgaactccgggccaaagcgcgccgggtcatgcgggaccagggcggtttggcagccatcggcgtggactatctccagctcatgcgctcccactccaaacaggcggccaacagccgtgaacgagaagtggcggaaatatccgccggcctcaaagccctggccaaggaacttaaagtgcctgttatcgttctggcccagctcaaccgcggtccggaaagccgcacgggagccagcctgggcgtcccccgcatctccgaccttcgcgaatccggctccatcgaacaggacgcggacatgatcggcctgctctaccgctccgcctactatgcggaagatgaggaaaaacgccagcaaatggccggacgggccaatctgcatctggctaaaaaccgcaacggccccacgggggacgttccgctccacttcgaagcggaactcatgcgcttctccacccgcgaagcggatgaacacgaccaggaaagcgaataaaaactttctctccagacgcctgttctctacggattagcaatccgttataggcagaaaccgaagaaaatcctgtttgacttaggaaaagttgcaaagagctacagccattgaaatacagacttcttcttacatgtaacgtattccagaaaagagagttatcaaaatttaactacagatttaaataacgcaaaggatctccgggctttcattggaagccaatggcgccgggcagacttcatttcataaaaacgcctcttggcatggaaggaaacgccaatacaagtcattccagcttagaatcaaagcttgaccccggattgctaacccggtagcatcacggtagcgccagcgtttcctctgggcttattaatctagttatttttttaatatgaaaaaaaacttatttattgcggcaatcctctgcggatcatgcatctgcgccaatgccgccagcatggtcacggaatggaccggcaatgccggccctacggaaggcaacacctatgaactgggcaatgcggacaactggagcaacggtgtacccgcccgcggcaacaaccaggggccggacgtcatcttcaataacaccggaaccatcaccctcagcggctccatggtggacacatccgatggcggcagcatcaccgtcacgggcaacagcaatgttacggttgggggaacccgctggacgggaaatgtcaccattggagcaggttccgctctttccctctcacaagtggactttaaaagcagtgacatcatcctggacggcaccttcaaccttggtgtctgcgggattgattccggcggcaacggcgcccgccttgtcttcggcattggaggcatcatgaacgtcaaccaaaaaatatggggagcttcggacttctccgtttccggtacgctggccaccacatccacggatctggctgctggagaattccagtttgttacccgcacgctgattacctccgccggctttgacggcggttccatttccctgggagacttcaccgctgaagacggcggagcgctgaccaaggcatccggcatcatggaagggaatgccgcagactatcagggccagtactatctctacacggaagacgggaacgtcaaagtgcagtacgtagtggcgggagccgttccggaacctgctacggccaccctcagcctgctggggctggcttccctgatgctgcgccgcaggcgcgcctgaccttccacaccctgtcttttttcctcaacagcctgtatgcccacgcatacaggctgttttattttcaggcgagtgacgaaaacgtcacaaaaaacatcttcatgccattgccgggaatccgtagcatttttccattatctcccgttcgacgccatgcaaacccacgcaaaatcactcaacgaacgtttccgcacactcatctctctgattttcggtctggctatcggctgttccctgctcttcggggagtcccgctgggaaacgtctccgctcattgaagaaagcctcatgctcctggcctgcttcatggccggcataggcgccttcgggcgcatctggtgttccctctacattgcgggctataaaaacaacgtcctggttactgacgggccatactccatgtgccgcaacccgctctatttcttcagcttcgttggcagcataggcgtatcctgcgctacggagaccttcaccatccccctgcttacggcgctggcgttcggaatctactacccgtccgtcatcagaaaggaacaggaaaggctcaccgcccttttcggagacgcctaccggaactattgcagaaacgttccctccttcattccctccctctcacggcttaaaccgccgcctgccgcctactccgtcaatcccgccacattcacgcacaacattgtggatgcgctgtggttcatctggttcatcggcatctttgaattcatcagcggacttcatgaagccggaatgcttcccgtgtggttcctcattccgtaacaggctcttttctcctggcatccagaagccccgcaagcgcccgttgggaaaccatcttacggaaagatgcgcggtcccgcggataaagcatcatctccgtccgcgtcttccccccccggaaagcccaggcaagccatacggtccccacaggcttttccggcgtaccgcccccgggtcccgcgataccgctgacggcgacagcgacatcggctccggagcgttccagggctccttccgccatcgctttaaccacgggctcgctcacagccccgcaacgcttcaggacctcctccggcacgcccagcatctccgtctttgcccggtcggcataagtaacccacccgcattcaaaaaccccggaggcccccggcacatccgtaatcctcttggcaatcaggccgccggtgcagctctccgccgtcgccgccttcagaccctgctgcgccagatggcacacaaccgctttctccagggatgcccccacaggagccagcacatacgccccggccagaatgcgcaaacgggcctctccctgtttcaaagccacctcactgcccaccaggcgcacgtccacttccccgacgcgcgcgcaatacgccacctccagaccctccacctggtgcagggaatcatccaccagctcttggagatcgctctcccctatccctaccaggcggaacacgcacaaatgagaaatatcctcatccgccaaatcttccagaagcggcatcacggaatgttccaccatcggcttcaactccgccggcggccccggcagcaggatgaacatgggaagggaaccgctggcaggcatcaccagtccgggcgccgtcccgttggaattctccagcaccgcggcgccatccggaaccatggcctgcttgaaattacactccgcaatgggaatccccctccgtttaaaataactcttcagccactccgccacatgctcgtcacggtgcatgtccacgccgcaaacgtcgcacagggcttcccgggtcacatcatcgctcgtcggccccagtcccccgcttacaatcacgatatctgcgcgccgggcgctctccctcatggcctcgttaatagcgtacccgtcaggcactacggttaccctccccacgcggaaccctgcctcaaataatctgttgcccagccatgcggcatttgtattcacaatactccccagcaaaatttccgtcccggtgttgatcaattcaaccctgatctgtttcatgcagccagtatgctccctcaagcgctccgtgacatgcaacaatcctgccatgtatcataaaaaacttcatttaaacgccccgtaagatacattaggggcactgacaaagaccatgaacacaccttcccggccccgggccaccaaaatcatctgtactattggaccagcaacagacacttccgacatgctgggccagcttattgaagccggagccaacgtcttccggctcaacatgagccattccaaacacgactgggtccgggaagtagtcttccgcatccgccggaaagcagcggaactgaaagcgaacgtagctatcctctttgacctccaggggccttccattcgcacgggagatctgatggaaccctaccatttgaaaaagggagacaccgtggaaatccgcctgggcacagccaagccggaacttcctttttccaccacggtaaactatgacggcctcctgcaggatgttcaggcgggccataccatggtggtggataacggaggcatcctcatgcgcattgcggaagtgcgcccggacaggctcatctgcgacgtgctcacggaaggcgtattcggctcccgccgccacatcaaccttcccggcgtagcgctgcggctcccggccctgacggaaaaagacttggcggacctggccgtggccgtagaatgcgagacggactacgtagccatgtccttcgtccgggatgccgcccatattgcccagctccgggaacacatcgacaacttgggaggcaaggcccagatcgtcgcaaaaattgaagaccagcaggctgtccgccacattgacgatatcatcctggccgcagacgttatcatggtcgcgcgtggagacctgggcattgaagtcagcattgaagaactgcccatcatccagcgccgcatcgtccgccattgccacaggctgggacgccgctgcatcgtggcaacgcatatgctggaatccatgataacccagcccacccctacccgtgcggaagtcacggacgtttccaacgccatctttgaacaagtggatgccgtcatgctttccggagaaacctccgtgggccattaccccgtacgctgtgtggaagtgctggattccatcgcccaccgcatggagtgctccggcaatctcaacttcgcggcatccgccatcctgaacggagaccgccagaaagccaccaaggcagccatctccctggcggactccgtggaaaacgcctgtctgatcgtctttacccgccgcggcctggccgccacgcaggcagccgtcctcaggccggaacgggctgccattttcgccttcagcaatgaccctgtcgttgtcaggcaactcgccctggcgcgtgacgtaaccgcctttgaatcacccttcctgaaagatccggcccgcatgatttccaccgccctggacctgctgaaagaaaaagggctgatctcctccggccagcctgtcgtcatccagggggacagcctgcaaggggaactgctggcggactccatcatcttcatgcgcgtggaataatggcctgcacctttcctatagagcgggagacggccgtgtggcccccgcccgcccccctcagggaacttctgctggatgcggatccggacgaacgccggatagcggatcatctggcccacggcgaactttacgtcgcaaaaaactgcgggactgccgccggagtcattgttatccgtcagacgagggaacatacatgggaaatcatgaattgctccgtagctcctgaatatagaaggcagcattgcggaacagccctagtgcggcacgccctggacatcatcagaaacaaagggggccggtatgcggaagtgggaacgtccgatgcgtctccggggccaatggctctctatgaaagctgcggattccagatttctggcgttatcaacaaccatttcacggacaactatccggaccccgtctgggacaatggcgtgcaatgtattgacatgatccgcatgcgtgcggacctctcccttcggaaagaaggagcgcatcatgctgctcaaaaagcataaaccacgctgactcccgtcacccagctattgccctttaccagcgttcttccatacacgcggttcaccccgtgggaacccttgccgagccagtgcaggccaacgaaaggctctataaaaacattcccgaacagacggtaattcgccgtcaccctgaaatagagagactgccagccattgctgctggaaggccaataggaagaactcaacacggcgccgaatttaaaacccatataaaggttttccgtcatccggaaatccgatcccgtacacatgtcaaaccaccagcccgtgattccgtaaaaggaatatgcggcacttccctgcgcataaaaaccgggaaggaatcccacatcatggcgcataatcagtgccgcttcatacgttgtccccccattgccgaacaaacgttcggaagcaaaccccgccaatccgccgtcattcgcacgaaaggataatgccgcatacgtagcttttccgaacttccgctgaagaccaagatccaccatcgtctcattctctatatcaactgccggatgccccagaaagatctcctccttcagagccagaatcagggaataccggtcattcaaatcgcttctccaatccagccgcaaaggagccgtaggattacagcccgcgggaatcagccccctgaactcgtaattagtggaatacccggctttgatactgccgctgaccggtcttaaagcaggagcggaaggaacctccggaatgcgtgattccgccgaagaaacggccatggaagcgacagagacgatgcccgctccaaagagaaaagaaaaaaagaaattcataacatcgaaatgccgtgcggaaagtattctggataaaaaaactcctcttggcaacaagcaaaaacgccgctgttttctgctctgcttcaggaaacatcattcaggcctgcctgctgccaacttcagaaagaataaacgagaccagccccggccactactccgaaattcttataaggcttgtcgcccctgtccgaacctcggttggccttcaaggcgccctctccggcccagttgaagctgacgaagggaacgagagacaggttcttggcacccagtttcaccggaagttcagccttcagccaccaggcctgggaaccgttggacataaaaagggatttattgtcaaaataagaggaagtggcagacatcccggcgctcaatacaaaatcgatgtcggagcatatagctgcctgataccccacatgcggccggaaccaccagccggtcatgccctggaaggcatagctcatggttacgccggcaaaccagtttccgggcaaaccgtaatccagcgtcagataaaattcctgaatgacggaatgggtattccttatatacacatcttcatcactcatccaggtggcgttataatcatacctggcaaaattcccaagcaggccgccgtgaatcaggttccagccaagcgtcgtggacaggttcttcagtaaaccatcccggttcttccatccaaaaagaaaatcggtctcgttatgaaaagagaaatctctttcccctgccatgtggtgtcctgaaatcaggaacgtacaagatgccgccccaacaacggaattacaatcatccaatttataattcaaatccacactggcaggaataattccatctccttccgtcagtgaatgagaagccacaatgccgcggcaggtgtaattggaagcatacccggcatcaacttccccggacaaaggacagtcctgttccacgggaacagaaaccggagaaacagttttaacggaaatttccgcaaaagcggaagcggcaaaaaaaacggcaccccccgcaataccaatgatatttctgaattgcatcatcacgcttcaaatgaaaatctggatatcggcgcattgcaaaaaacggagttcataaaaaacgatacgccgccagcaattaaaaaaagcgcggcggatttctccgccgcacctgaaaatataattcaatcgcaggccggatggcttagaaagaatagacaaggctggctccagccactacgccgaagttcttgtaaggcttgtcgcccttatccaggcccttattgaccttcaacgcgccgcagccggcccagttgaagctgacgaagggaacaagggacaggttcttcactcccagcttcatcggaagttcagctttcacccaccaggcctgagcgccattggcctgctcgaacgcagcgccaaaatagctggacgtggcagacatcccggccgtcacgacaatgtccgtgacggggcagagggcggccttgtagccaacataaggttggaaccaccagccggtcatgccctggaaggcatagctcgtggttacgccggcaaaccagttctgagtcagatcgtaattcagattcaggtaaaattcctgcgtgacggaatgagcatggtcatacttggcaaagctgcccagcaaaccgccgtgaatcaggttccagccaagcgtcgtggacaggttcttcagcaaaccgtccttattctgccagccaaggttgaaattggtctcattgtggaaggaagtatccctgtcccccatgagatggtggcccgaagtcaaggtcgtataagaagcggaagccacaatagagttggcatcgcacagcttgtaattcagattgacaccggcggggatgacgctatccccttccgccaacgcgtgggaagccacaatgccgcggcaggtgtaattggaagcgtagccggcgtaaatatcgccggacagcgggctggaagtcgccacaggagcgggaaccggagtcggagcaacaatcttgacgggagtacccgcaagagcagctccggcaaaggatgccacaactgccgcaacactgatgatgttcttggtttgcatgactattacttggttagggtattaattgttgatttgctaacatggaaagaaaaatgctttttccccccttgttaagaaaagtgaaacattttcgtcacaaaagtaaagaattttctcttgataaatcagcaagtcattgatttcacattatttacatccaccagccccatgacaaaaaatccaattctccatatcttgccaaaccttcccttccaaggccttgctggatacagacactccgcaccatccagaagcctgtcttctttcagggcaggagaaggattcaccaaaaccctccgcctgcaggaaagcagcatgggcaaatccgcggcactgtcgctgtaggcaacggcgttttccagaacaccatgttccggcagtacattccgctcccgcagacgttccaccttcactgcccccttattattaccgttcggcagtttcggcattgccggcatgcgttcctccagaagcacatccgttcccagaacttcgtcaaatcccagcagttcacccagaggcttcacgtaaaatgatggagaagcggaaaccatgagacacaaataccccttcttccgatactctgccagccgctccttcagctccggataaatccattcctgcgccatctcggcaaacttccgtccatattcccgcaccgtttcagcgggaagcccccacaaatacatgagataagccctcttcatccggttctcatcccatattctcaaaatatagagcgggatacaggccaggaaaagaaaaatcagcaagcgtctccaaggatggcgcctcaccacaaaacaggaaaaaacatattgcgtatcccagggaaggagcgtgccgtccatatcgaaaagcgctgcgcctctttttttccaatcgtccgtcatgctttcatcctatatccgtttcccttaactctcaacacccaactcttccattactcccccctgaatgcccaaaaccccggccgccgaaaagcaaccggggttttgaagcaaatccagaaggaaataaagattaacgggagtagaattccacgatgagctgctcgttgacgatgggagcaatctcttccttggaaggcacgcgggcaatcttgcccgtgagcttgtcacggtcgcattccagccaatccggaaccacagtagcctgagtcaggtcaagggaacgggtaaccagctgctgagaggaagccttgccgccaacggcaatgacatcgcccggacggcaggagtaggacgcaatgttcgtctttttgccgttcacggtgatgtggccgtgggaaacgagctgacgggctccggcgcgggtgttgctgaaaccgaggcggtacacaacattgtccagacgaagctcaaggagctgaagcagaatatcgccggtaatgccgcggcggcgggcggcttctgcataatacttgcggaactggccttcaagcacaccgtactggaaacgcagcttctgtttttcagcaagcatcacgccatagtcggatttcttcttgcggccggtgcgcatgccatgctggccgggagggaaggggcgcttttcaagagccttggtggaaccgaaaagggcaacgccaaaacggcgggacactttatcgcggggaccggtataacgagccatgatatattagatctataggtaaaggattctcaattagacgcggcgggccttcggaggacggcagccgttgtggggaatgggagtcacgtccttgatggaggtgatttcaataccgatcgtctgcacggcacgtacagcggattcacgaccggaaccggggcccttcacacgcacttccacttcacgcaagccgtggcccatggcctggcggcaggcgtcctggcacaccacctgcccggcataagccgtgctcttgcgggaacccttaaagcccatcttgccggcggaggaccagccgatgacattgccgcgctggtcggtcacagtcacgacggtgttgttgaacgtggaggaaacgtgaaccacgcccgtggaaacgtttttgctgcccttggccttcaggattttgggcttgtcgtcatcgccgcccagaccaagttccgcaaagatgtccttgcggggttcgggcttcttgatttcttcaggagcggaaacagcggcggccggagtttcagcgacgggagcgggagttgccgcttccacaggctgttcggcggtttcgttggtgatttcttcgctagccatagtaaagctatattaaaattcagattggcggattacttcttcttggcctgcgcgccaacagtcttcttcttgcctttacgggtgcgggcattcgtacgggtacgctggccgcgtaccggaaggccgcggcggtggcgctgaccacgatagcagttaatggaggtcagacgcttgagaatggattgcttttcacgacgaaggtcaccttcaatcaaaatgccgtcagtggtgattacttgaacaatcttcgtgagctgttcgtcggtaagctgtcccgtgcggatgtcgggattgatgcctgcttgttccaggattctcttagaagtcgagcgaccaattccgtaaatatacggaagggaagcctcgatgcgcttctcgttgggtatttctgtaccgaaaaggcgtgccataatggattggatttgctagctgttatttttctctgcctcgcgcagagctattgcttggggcaagatggataccataaattgaggttttgacaagaccaaaacatcattttttctatttttaatctcttgcaccgcttgaagatgcatgccgcccgtagcggcggaggatacgctccacagcccaggaagcgtgttcctccaccagaggagactccccgtaaagcgccttcagaaaatcaatgtcatccggagtccccgcattccccagcacaacgcagccgttacgcagcagcccttccctcttgagccttttcaacggggaattccggaacagggccgcaaaaccgccggcatccagggaaagaagaccgcgcaggggaatggaagccagcagacgggacatgcggaaccgttcgtcaacatccggcaaaggcttaccgttccagggacagaccgtcacgcaggtatcgcacccgtacaggcgcgtgcctatcaggggacggatttcttccggaatagccccccggtgttcaatcgtccagtaggaaaggcagcgtccggcatcaacctgaccgtttcccataattgcgcccgtcggacacagggccgcacaacggcggcaactgccgcatccgtttgaaaccggagcgtccggttccagttccagcgtagtcagcagggtagcgataaaaaagcgggagccccctttcctgcgcacgatcagaccgcttttcccgcgccagcccaggccgcaggcctccgcatggtcccgttccataacggggccggagtccacataccccttctgcttcccgccgtaaatggaaagcagctcctgcaaatccgccagtttttcctccagaattccgtggtaatcctttccatgggcgtaaaggcaaatgcttccctccccctccggacgcctaccggggctgtcataatcataggacaggcagatgacggaacggcatccgggaagcacttccgcaggatccgtgcgccgctccggggaacgcgccatccactccatcccggcgtgccatccgcgctccagccattgaaacaatttttccgcatgcgggcttttttccgcacgggccacccggcagccggaaaaaccaagctgccgggacacggcgcacaaggaatctttaataacagaggaatccggagtcagcacgccggaatcatgaacaagagcgtgcctcccaccaagaattttcttctgtccggtggaaattggattgcctgcaccccgccgccgcttcataatgccgcatatatgaacatccggattctgagcgatgggaaacagggccacctcaaccagtccctggggctggcgcaagctctgatctccaaagcggggggaactgtggaaacggtgaacctgcaggggctttcccttttggggaaaatccggaaggtcgtctcaggcagcgacattccacggccggatctgttcatttccgccggacatgcaacgcatatcccgctcatctgcgcgcggcaccatttcaaaacccgggccatcctctgcatgaagcccacgcttccctgctcctttttcgacctctgccttattccccgccatgacctggattccggccgcgattacacggatacgaatatcttccctacccagggagctctccaccccatgagaccggatacttccgtaccaaaggataccacactgattctcataggaggacccagcaaagattttgactgggatgacgaaagcatgctcaaccagctcgcgtccatcagcatccacacccccggagacctcgttctgaccacctcgcgccggacgccggacggctttgcggaaaaaatccggacggccgttccggaactaaccgttgttcccgtggaggaaacccggccggggtgggtagcccggcatctggcgcacgcctccgccgcctgggtcagccaggacagcgtctccatggtatatgaggctcttggctccggcgctcctgtaggcatcctttccgtaccgcgccgacatggcagccgcaaatcccgcatcctgtccggcctggagacactggaaaaggaaggcatggttactggatacagtgactggaaaaaacagaacttccgcctgacggctcccggttccccgcttctggaagcggaccgtgcagcagactacatcctctccagatttttccctcagctccgcgccttatgaaaatagtacatctcgtcccctccatggaatccggaggcgtggaacaagtcgttatggaactgggcagcggcctttcttcccggggcgtggaaaatatcgtcgtttccggaggcggacgcctggtgccccgtctggaaaaggaaggctcccgccacatcctgatgccgataggcaaaaaaagcatctccactctcttccgcatcggggccctccgcgccctgcttcaggccgtcagaccggatatcctgcatctccattcccgcgttcctgcgtgggcaggctacttggcatggaaaaagctcccgccggaagaccgtcccggcctcgtcaccagcgttcacggcttctactccgtcaatcggtactccgccatcatgagccggggagagagggtgatcgccgtctccaactgcatcagggactacatccttgaccattatccgtccacccctccggaccatatcagaatcatacccaatgctatttccccggaccaatatcacccgtcctactccccctcccgggaatggctcacgggctggttcatgtcctatcctgaactgaaggggaaattcaccctgtgcctgccgggccgcatcacgcgcctgaaagggcatctggatctgattccggtcgtcaggcagcttctggaacagggaattccggcccacgccgtcattgtaggagaagcaaagaagggaaaagaagaatataaaaacgaggtcctgcgggcaatagaacgttccggcgtctcccagtccttcacctggacaggccatcgccaggatctaagggaaatcctttccacatgttccgtcaccctctccctgaccaaaagcccggaagccttcggcaaatcaaccctggaggcgctcgccctgggcaagcccgtggccggatacgctcacggcggagtcaaggaacagctggacgccttccttcctgaagggaacgtcgccgtaggaaataccgccgccatggcggacctgctggcccgctggcatgcccagcccccccccctgccccggcaaattccttccccttacaatatgcaggatatgattcaagcccatctggacgtttaccaggaactgaccccttattcatgacaccccgggaagcagccatagccctgaacctgataccgggcctgggccctgtcagaatcatgcgtctcctgcaggtattcgcctctccagaactgattctggaatccccttcctccctgttgatggaaattcccggcgtgggggcgcagctggcttgccgcatttcctcttggcggagtaccgtcaacccgtacagggaactggaactggcggataacgcgggggccgcggtaaccacggtttttgacgactcctacccatcctccctgcgtgctctcccagacccgcccattgtcctctactcctggggaaactggaccggaacggatgccgaacgctccattgccgtcgtcggctcacggatggccacccattacggcaggctttgcgccagaaacatctcccatgacctggcggaagccggagtcaccgtcatttccggactggcgcgcggcgtggacacggaagcccataccggggccatggacgcggaggggcgcaccatcgccgttatcggagcaggactcaacaaactgtatcctcgggaaaacagaaatttggcgcagcgcattgcggacgggcatggagcggtagtctccgagttcccgatggacttgcccccttcccgcaccacttttcccatgcgcaaccgcatcgtgagcggctggagctgcgctacgctggtggtggaggcgtccggacgcagcggagccttgatcacggcccgaacggcggccgaacagggccgagacgttttttgcattcccggaccggttgaccggcattcttccgacggatgccatgccctcatccgggacggagccatcctggctaccggagcctccgatattctgcaggacatgaactgggccgttccggaacagggactgcctctcttctcgccatgtcccccttccggagcctcacccccaccgcttcccactttggaagaaaaggagattctccacgccatcagactgggtttcaatactattgacaccctctgcacctctctgggaaaagcggcgcatactatcaccccgcttttggccaaaatgcaaattgcagggcaaattactccggacgctggagggtatttctccattaacagcagggaactttaggaagattccgcttttccgccggggaaaacgccaggtccgggcctcctctccctgaccatggaaccggaagggagcgccgtccatctcccgtataaaaacctttccatccggatgcaaaaaaacgtcttaaaacagtcaccaaatcctctccttcaataattttattccaaaaattaaatatatcgtcaggacatccccggcattttaaatgtctgcggcaaaatttacatgcccgcgaaaaacaaaatatgttcggaaaaaatctctgctatatttacgggacacaggctcgggcgcatacggcaacacctcttaaaaagaactgttgacgaacatattttgaacgcatctctcctgtctggagtctcatccttcacaagatctgtccgacggatggaaaaagcaattcaaaatccgttcagggtggtttttggttccataggtagttaatagagaaaaaaggccgcggattatccgatccgcggcctttttcgtccggctctctttcaaatgcggagtttgggcttgatgaacgaaacttcttactgtagcaacaagacatgcgtttattcgcccttcttgcaggattctccctttgcctgagctccacaagctgccaatcgtacggggattcaagtgactacatccccctcgcaacgcccgttcccccacaactctcccagccggtttcccatgccctcccccgaccggccaatttccccacacgccctgtagccatcccctcaagcgccccgcgcacgccccgctgcgccagtgcctgcgtcatggacgcccttaccggcaaagtgctcttttcccacaacggcctccagcaccgccaggtagccagcacgcagaaactcgtgacagccatggtcgtgatggaacacggcagcctggacaaaaaagtggtcatccagccttccgataccaaggcggaccccaccaaactgggattccgggcgggggaagtctattcacgccgcgaactgctcaatgccatgatgatccgcagtttcaacgacgtagccctggcgctggcccgcgatacggcgggttccgttccccgtttcgcccagttgatgaatgccaaagcccggcagatgggcatgtacaactcacgcttcgccaatcccaacggcctcccggcagatcaatattccactgccattgacatggcccgctgcgcctattacgtgtaccgcaacccggaactgcgcaatattatctgcaaacgccaatatgcctttacccgcgccaacggcagaacgcttctgttgagaaacaccaacaagctgctcacccagaacccctgggttaccgggatgaaaactggatacacgaacgccgccggacgctgcctggtttcctcagccggcgtcaacgggcgccatgtcatcgtcgtcgtcctcggctgccatccgtcccgtatctggacggaatcggaaaacctgatcagatgggctctgggatacgccgtataaatgcccgtcggcaattggtatttgactttcacggcgtgacccgctatcagtcctgcctatgttacaggcaggtattgtaggtctccccaacgtcggcaaatccactctattcaatgcggtcacccggacgcgcaaggcccaggcggccaactatcccttctgcaccattgacccgaacgtgggtatggtaacagtcccggatccccgcctgcaggttctttccgacatgtccggttctgaaaaaatcatccccacgcttattgaattcgtggatattgccggcctggtcaagggcgcctcggaaggcgccggcctgggcaaccagtttctggcgaacattcgtgaagtggacgccatcgtgcaggtagtccgctgctttgacaatgatgatatcattcatgaactcggttccgtgaatcctctgcgcgacattgacatcatcaactcggaactcattctggcggatatcgccaccatggaaaagagactctcttcccgcgaacgcaaggcacgcagcggcgacaaggaagccaaggccgaagtggccctcatcaccaaactcctgccccacctgaacgaaggcaatcccgccctcacccttgaaccgcagctggacgacgatgaacgcaagctgctccattccttccagctgctttcggataaaaaaagcattttcgcctgcaatgtcaatgaagacgaactggcggacgccatctccaacccggacgcccatccctacgtctcccaggtgaaaaaatacgtagcggaacaccacaacgcggaagccattgtcatctctgcccggattgaagaggaactcatcgacgtctcggaggaagaatcccgcgaatttctggaatccctgggcgtgcgggattccggcgtttccgacctcatccgggccgtgtaccaccttctgggcctgcgcacctacctcaccacgggaatcaaggaaacgcgggcctggaccattccgtccggggcaaaagcacctcaggcggccggcgttatccacacggactttgaacgcggttttatcgccgcagaggtagtgcactacgacgacctggtttcctgtggcggcaaggccggagcgagggaacacggcaagctgcgcatcgaaggaaaagaatatgtcgtcaaagacggggacgttatcgaattccgcttcaatgtctagacggaagcgttaccggaattccattgacttttactgatataaggggcagattgctcacaaccttcacatcgcctcatgactgatacagacgtcaaatccacccccctggcagctaaacacgttgaactgggagccagaatggttccttttgccggctggaatatgccggtgcagtacaccggcattctggacgaacacaaagcagtgcgcgaaacctgcggcatctttgacatctcccacatggggcagttcacggtagccggcgattctgccgcggcctggctgaactccatgctgaccaatgacatcaacaaattgaatgtagggcaggggcaatactccgtcatgctcaatgacagagccggagtcattgacgaccttatcctgtaccggatggaaccggaaaccttcttcgtagtggtgaacgcctccaagattgatgaagacttcgcatggctttccgcccatcaacctgcaggcgtaaccctggaaaaccactccgacgaatacgtggggctggctgttcaaggtcccgaatgcggagaagtattctcccgcgtcatccccggtgtggaacttcccccccgcaatggaatttcccgcatctcggcggaagggacggatctcattgtctgccgcaccggctataccggggaagatggttttgaattcttctgcccggctaaggaaggcgtcaaatggtttgaagcctttcttggagcaggagccaaaccctgcggcctgggcgcccgcgacagtctgcgtctggaaatgtgctatcctctgaacggctccgacctctctccggacaagacgcctctggaagccgggctcggcttcttctgcgcgctggatacggatttcatcggttccgatatcctccgggaacaaaaagccaacggtctcagccagcggctggcggctattgaatacaccggcaagggagcccctccccgcgcccattatgccgttcacgtccccggcggagaagccatcggagaacttaccagcggcgtgctctctccttcgctgatgaagggtattgccctggcctacctgcctgccgcccatgccaaggtcggcacggagctggaaattgacgtaaggggaaggaaatttccggccgtggtcgtaaaaaaacccttttataaaaaaggctgacacgacggcgcaaaaataaactgacaaacacctcattttactacactctcacttcaaacaattacatcttatgcacgacgtaccagaaaatctgctgtattccaaggatcacgaatggattgaaattgacggggacatcggcaccatcggcatttcagaccatgcccaggccgaactctccgatgtcgtctttgtagaccttcccgaagtaggcgccaccgtcgcggccggcgaccccgtcgccgtcgtggaatctgtcaaagccgccagcgacgtgtacacccccgtttcaggagaaatcctggaagtgaatgaagagctttccaatgacccctccctcattaactccgacccctacggcgcaggctggctgtacaaaatccgcctggacgttcccacggaaacggaagatatgatgaacgccacggattacgaggaatactgctcctgaaccattctttcctcccccgccccggtgattccatcccggggcattttgtttggcccgtcccgcggccggacgctattaccagccagagataccacatgaatacccactcagattttgccagccggcacatcggcccccagggggaagaacgccgggaaatgcttgacagcctcggctaccggacgcttgacgaactcattgcggacatcgtccccgcagatatccgcatgaaggccccgctggacctgcccgcagccaaatcggaaacggaagccctggaggaactccgttccattctgcggaaaaacaagctcctgaaaaccttcattggccagggctattacggcaccatcactccctccgtcatcctccgcaatgtactggagaaccccggctggtacacggcctacaccccttatcaaccggaaatcgcccagggacggctggaaatgctcatgaatttccagaccatggtctcttccctgacagggctgccggtagcgaacgcctccctgctggatgaaggcaccgcagcagcagaagccgtcaccatgtgccggaacgcgcgccccaaagcaaacaccttctttgtggcggacacctgccatccccagaccatcagcgtcatccgtacccgcgccgccttccagggcgttaacatcatcgtgggagattgctcatcctttgaccccgcatccatcggtgcggatctggccggagtgcttgtccaatatccggacacgctcggccgcatctgcgactacacggacttcttttcccgcgtgcatgccacgggcgcgctctgcgtcgtggcggcggatctcatggcccttaccgtcatccgggaacccggcgccttcggagccgatatctgcatcggcaacacgcagcgcttcggcatcccaatgggcttcggcggcccccatgccgcctacatgtcctgcacggacgctctcaaacgccgcatgcccggccgccttatcggcatgtccatagataccctgggccgcccggcctaccgcctggccctgcaaacgagggaacagcatattcgccgcgacaaggcgacctccaacatctgcaccgcccaggtgctcctggccgtgcttgccgccttttacgccgtataccacggacaggaaggcctcaaacgcatcggcacggaaatccacttgaaaaccaaaagcctgtacaaggcgctcacggaagccggcatcgccattaaaaacaaaaacttctttgacaccctgctgctgtccgttcccggacaagcggacgccatggtgcaaaaagccctggaagccgggtacaacatccgcagggtggatgccgaccacgcagccatctctctggatgaaaccgcaacctgtgcggatatagcggcactggcctccgcccttgcaggtgcggaaacatccgctgcctgcgattgcgacgctcctgcctgggatcccgtccacacgcgccagacgcctttctgcacggaaaaggctttcaactcctaccattccgaaacggaaatgatgcgctacatccgccgcctggaatcccgggacctggctctaaatgaagccatgatccctctgggctcctgcacgatgaagctgaacgccgcctctgaaatgattcccatcacgtggccggaagccaactccctgcatccctttgttccggcggaccagtcggaaggcatccgggaaatgctctccgtcctgtccgaccgtctggcgaaaatcaccggctttgccgccgtatccctccagcccaacgccggcgccgcaggggaatatgccgggctactggccatccgccgctaccagaagcacgccggagaaggccaccgcaatgtctgcctcattcccacctccgcccacggaacaaatcccgcatcctccgccatggccggcctcaaggtggtgcccgtcaaatgcgacgaaagaggcaacatcgacatggcagacctgaaatcccaggcggaagcccataaggacaatctctcctgcatcatggtcacgtacccctccacgcacggggtatatgaacagacaatcaaggaactctgcgacatcgtccatgccaatggcggccaggtgtacatggacggcgccaacatgaatgcccaggtaggtctgacttgccccggctgcattggcgcggacgtctgccacctgaacctgcataaaacctttgccatgccgcacggcggcggcggtcccggcatcgggcccatcggcgtagcggaacacctcgtacccttcctgcccgggcacctcacgctgggccatgaagaaggggccgtagcgtctgcggcgtggggaagcgcctccatcgccgccatctgctggatgtacctctccatgatggggccggacggcctcagggaagccacggaaatggccatccttaacgccaactacattgccaagaaactcggacatctcttcccggttctctactccggcaacaaggggctggtggcgcatgaatgcattctggatccgcgtcagctcactcatgacgccggcctcacggtggatgacattgccaaaaggctcatggactacggcttccacggccccaccatgtccttccccgttccgggcaccctgatggtggagccgacggaatcggaacccaaaaaagaactggaccgcttcattgaagccatggaacgcattcatgcggaaatcacggccattatcaacggtacggcagacaaggaagacaacgtcctgaaaaactcgccccataccgcagaaatggtctccgccgacgaatggcggcacccctactcccgcagtgaagcggcttatccggtctccggtctccttattcacaaattctggccgtatgtaggccgggtggataatgtgtacggagaccgcaatctggtctgcacctgcgacacggtggaggaattctccaaggccgtagagttataaaaatctcatccttcctttcaaaaaggctgttccattcatttggagcagcctttttcttatgttcaagaatcggatttccaatccgaaagagcaaacatatccagaaaacaattaagcccaaaagcaatatgggttgaaaaagaaaaaaggaacatttctcccaccccgcttttcctcccctttcattttgatgacccatttgttctcaaaatagagtgttgacttcggattggaaatccgttgagctacgtctcagatgagctttttctctgcccttactgttcctggccttcaacagcatctttctttttccagggaagattccgctatcctcaaagggtatggaattctcttcatgatctttcatcatgtcttcggcttatacgctctacccgcaggtgtggatacggcatggattgctccccagcttaccaaagccgctcccatctttaaaatttgcgtgcccatttttattttcatcacggggtacgctatgggatggaaaacaaattcatccccaaccttcggttccctcattaaaacaggcttttcccattactttaaattctggaaaatttatttcttatgcctccttctggctattctggtttcctgggcattccccttgcccattttgccatccgttgccgacatgggttggaaaaatggcctgcttgtcgtaacaggattgaggccctgttatcccgactggtggtacatggctcttttcgcggcagccaccatggccctttatccaatctgtgcgtggatcacgcatcacattgcgcctgtcccgtccatggcagctctgctgggagtgtctcttttacttcaaagtacggctcacattcccagcctgccgggaatcgcctattccttccctcctttcctgccctgcttcattcttggctacatgtgcgcctttctggcttcacgcctctctgctctttcaatttcccaaagcctgggggcaatcctgttgctggttcttgaaatactatccatccatctcttcagtttttcaaaagccaaaaccctgacggttatctttctcttcaccctctggtgtctgccttggataacccggaaactccgcctcacaccgctcttgacgctgctgggaacttattccgcacttatgtggctgaatcacagattcattttcggctaccacttcagctgggacctctatggaacccaaagcatcagcgtagtattcatcgtgacgctggtctcctcccttctgctggccatggccatgcaaaaactttttaaccggatgattccctcaaatccgcaaacgcagtcaaaaactttgtagcaactttacaaggtccggattccaacacctcttaattccaagggggatctccgtacttattttctccaatccggctttccccatgggataaataccacaacagcagccaccctatgaagggaacggccagaaaaaccaggaaaaagccgctcctcccgacatcatgcagacgccggaccatggtagccgccagcggaatagacagcacggcgagcaccacgtacagcagaggggaaaccagctcaacccacggaaccagggacgggaaaaaaccgcattccgcaaaagaggggactcccgccacggccagccacgcaacccccactctggaaaaaacctcgtgcagctcccctttcccggcacggccctcaaaacggcaccatgccttgatgacgcgtatccagtacttcttcctgctccagccggagtcggcgcctccaggctctgaaccgggatccggcagaacggagggctccccatcatcatccataacagtcatggaggggataaaagaggccagaggcctccagtctccgccgggaaccttccggaccaaagtccggttggacaggcggccgaggttacgggcccgcagcaaaagcaccaggtcaaccgggcctttggaagaaccgtcaattgcctgatactcgtacagatcgctcatggggatgcttacctggattccttcccgtggctgaaggcggaggcgggaatctccttcttggacaaaccgggaccttcccacttcaaaaccagtttggaggcagtaccggagttccccacatagccaatgcggatgggatgaagtccagctttcaaataaacgggattcttccggtcacccagatcggaggagacctcggcccccggctcataagttttgtccgcgtcaatcaattccatgccgtgcagacggacaaaagccttgctgcccttattttcatccgtggtcagataaaacgtatatgctccgtcctctggaatcttcacatatcccgtcagctccacaccgcgcttgtccgaaccgttcattttcacggatggggaaggcgtcacgccatgggcggaagcaggcttcttccactggcggaaatccggtacccagggaaaatccccctcatacaaggcccatcgcaacccgggagaaacggttcccttcacatccacggcaggcaccagcgcagaatcaaacactgttttggaaggaagggaagcccggcgattggacaaagcggcggctttcatgcgggcctgaagttccggcttggaggatgcgagatctttgctttcctgcggatcattcaaagtatcaaaaatcatgaaatccttgtccgcatccttcacccccatgcgcaagcctttcaatccatccacaaaaacaatctgctgctggcctcgctgcgctcccttgtgttcgcccaggaaatccttatactccggcgttttgccggcgaaattatattcggcataaacaatgccgggcttctgctggtccgcatgaccggtcagcgtcggcagcagggaaacgccgtcactgcgggctggaaccggcaccccggcgacatccgccagcgtagccagccagtcatggaactgtccaggatgcaggctgatctgccctttgggaatgcgggcgggccagcgtaccagcgtaggcacgcgcatgcctccttcccagcaatcgcgcttaataccgtccatcatgccataactcttgaaaaactgcggattttgcgctccgtgccagtgcctggagtcggcgccaccctcattgtgggggccattgtcggacgagaaaacgatcatcgtattatcgtcaatcttcaaatctttcagcagacggatcaaatcagccacggcatcgtccacgcggcggatcatggtggaatgacgtttggccacatcattcgggaaacgggaattgtccggatgaatataggtatccttattcttttccgccttggcgtcaaaagccgtattcacggattccgtgccttccttctttacccattgcaggcctcctttcaatccgccgccggaaggatagggaacccccggaaccaccagattgccgtggggcgccggaaaagccaggtacaggaaaaacggctttccggtcttgcgggcgaacttgcgctggtccacaatccactgcttggcgcgggcggcaaataaatccgtggaataagccgtctggggcacctggtccttgatatttttccactcgggattggaagcgtaaccgttgtattcgaaaacgtcacgggattcggaaggatagtgaaaatgccctgccaaatggtccaggataccgtaaaaataattgaatccccgctgatgggggccggcggtcatgggcacatggctctggcctccgccgcctacaccccatttgccaatggcggcagtatcatacccggcatcacgcatcacggtacccagcgtatgggaatcttcaataggctggtcgaaacggttgtttctcaccacgcgggaattcccctggtgcacccccagcagcagggaggcgcgcgccggagcgcaaaccggagcggcggaataatgacggcgcagctgaatcccctcccgagccagagcggacagggcaggagtcttgaactcgttctttctctccaccgtccggccattcagcttctgctggctccagttggaatccagatcaccccagcccatgtcgtccaccagaatgaaaataacattgggttttgaagttttgacagaccgggcagccggcttcgttgcctgcccggaagcacccatgcacggaaccagggaagtcagaagaacggatagtaaagataccagcttcatgattcaaagaaaatagactctaaaaaagacgttaaaataaagcgttatcttacatgaattttctcatccctcaagaaaattacgaggaaagggcacagaggattgaatcgccagtattatcggcaaaaaacatcagggaaccagccttcacagccggaacaactacaacccgccatactgcaccaatgagcggcttttctggctgaagccaggaatgggagaaaattcctcctgcattcccggcgccccggtcaccagccccgcccggccatgctttatcctgaataaaacggcaatccccccgccgggcagaaaatacagaaaccggcggaaacagcaatcatgaaccggaacgttccaaaatgtccgcgccaattccggaacagcgttaataaccctgtccggaatagcgaaggcatcagaaacgcttcttcctgtcgtccctgcgggaacgttcgccccagcgttcgccgcggtcactgcggaagcccccgcggtttcccctgaatccgctccggtcactgcggtcccgctctccgcggtaactgttgcggaatcctccattgcggcgggaagagcgcggagttccggaatattccggagcccccttgtcttcacggacattaacttcatagccgcagacggtagccgtcgccagggcctccagaagcaggggcgccacggaagcgtccacttctatcagggaatgcttggggaaaatccggatatcgcccacggctcccttttccatttccaccgtattgtaaaataacccggctatgtctttgggccgcaagccaatcatccggcctccattcataaacagcgtaaccgtatcccccttatgctgccaggaatcacccttctgcgggctctccgcctcctccccggtctgcggcatacgccgcgccctgcgggcgggcttgtcttccggaatgggctgcacttcccggtgcgtacgttcccggagcaagtcaaacagggccgcagccatggcctccggcgcagcctccacttccttcaattcctccggcagcacggcatccggcttgagacgttccaggatatcatccaccagggactctgtccggagctggtccacctgaacggcagtcaacacaggttccggagtcaacttaacgccgatgaaacgttcaatgcggctcatcagggaaaaatcacggcgccccacaaaagtgatggccttccccttgcggccggcgcgtgccgtgcggccgatgcggtgcacgtaatcctccggatcacgcggcaattcaaaattcaccacggcatccacatcgtccacatccaggccgcgagcggcaatatccgtcgccaccagaaggcgcaggctccccttgcggaaggaatccatcacgcgctccctcatcatctggggcatatccccatgaaggcgatccaccggataaccgcgggccgtcagaccgtccaccacgtcatccaccacctttttggtattggcgaacaccagccccattttaatctttccggtgtcaagcagccggctgagtacctcaatccgggaggaaaacaccacttcgtaataaacctgttcaatggtaggcaccgtcagcgtaggccgttcaatggaaatctggatgggctccttcatgaacctgctcaccagacggttgatttccggagacatggtagcggaaaaaaacagggtctgcttcgtttccggcatggcctccgcaatgcgttcgatgtcttccagaaaacccatatccagcatctcgtccgcctcatccagaatcagcatgcggagtccgtccagccttaatgcccccgactccatcagatccatgacgcgtccgggcgtccccaccacaaactgcaccccgcggcgcagggcgtccagttgcggacggaaagaagcccccccgtaaatggggacggcggaaacgccgtccataaataaagcaagcttgtccacctcccggcaaatctgaacggccagttcccgagtaggacaaagagccagcacctgaacgcagcgttcctcaggctcaatgcactccagggccggaatggcgaaggcaagcgtttttccggaacccgtatgggacagccccacaatatcggccccactgatcgcggcgggaatcgcctgctcctgaatggaggaaggagtatcgaagccgagcacttcgatagcctccagaatctccggtgaaataccaagagccgaaaaagaagatgtttgagtcatggggaaaaatgatctgtcaaagtcacggaagaagctgaacattcttccctcccgtgtccagccaaaagaacggaagataccgtagatgccacgatttccgcaaagccgcctgcgaataaaaaaacggctctccccgcttctggtctttactgtcacacacggggttgcaacttgcaggggcgcattcgcgtatgatacaaatatttccctccgaattcatggataaaacgccaaacaaatcacagtcctccctgctggggattttcatcaacatcctcctcccggtgttgattctggactattgcagcgcggggcccgccaatcccctggaacgcccggaaggagaaaatttctggcatatcggcccggtatgggccctcgtcatcgccctttccctcccccttgtctatggtatccgttccctggtcgtctccaggaaatttgacctgatgtccgtcgtaggcatggccggcgtgctgctgacgggtgtcatcagcatcttcgtcatcggcccggaagggcgcatccacagcgccacaccctggctgttcgccggaaaagaagccctgatcccccttatcctggcggcggcggtcgtcgtctcccggtccgccggcacgccccttctcaacatgtttatctacacgccggagttattcgacgtgcgcaggatagaacaaacggtggccgccaacggcgaggaacgggcttatcagaaactgctggcaaactcgtcctggattctggcgggcacgctggttgcctcctccatcggcaatttcttcctgagcctctctttcatgtcttccgtcatacaacagccggaagcggaacagcaagtggcctacaacgccgccatcggcagcatcacctggtggggcttcctgatcatcggaatccccatcctggcagcccttgtcttcatcatgacccgcctgattaaacggctcggcaggctgaccggcctctcgcgggacgaactccttctcaaataacccccaaaccatgcgcctccatacttcatgcatcctggctgccgccatcgcccttcatgcggcgtgggcggacacgccccggttcgaccgggtcttcggttcccatatggtacttccccacgggaaaaacattcccgtttccggtacggccgcccccaacagggaaataaccgtcacttttggaaacactgccctgaaaacaaaaaccgactccaaggggaaatggagcgtcacgctgccccccatgcctccctgcgccacaggccagacgctggcggccgtgcaaaacggggactccgccaaattggaagatgtgctcgtgggagaagtgtggctggcttccggccaatccaacatgctgttccgcctgaaccagaccacgacggccaaagaagacatagcggcttccggagacgaccagctccgtctgctcaacaacgttccgcaagcccacaccaacaatgccccctactccgcgaaagactttgacgccgtcaccacggacaacttctataaagggcaatgggctgccagctctcccgccacctcagggccaatgactgccgtgggctactacttcgggaaaaaactccgcgaagggctgggcattccggtaggcatcatccactcctccctgggaggctcggaaatcgcagcgtggatcccccggcaggttattaatgccaacaacagcttccgcaccctgcgcggtaatcactggctggactccccccttatctccgactgggtgaggggacgggccaggaaaaacatctctccgcgtctgaaccagggctctccggaccatccctacaagccggcgttcctttacgaatccggcatcgcatggacaacggccctccccatcacgggcgtcatctggtatcagggcgaatccgatgcggagatcattgacaatgcccaaaacagcatgctgctgaaaaccatgatctcctcctggagaaaagctttccgtaacccggaaatgcctttcgtcatgatccagctcccccgcatcaacgacccgtcaaaaatccgtgccggatggccggaattccgtgaaatgcaagacgccgtggccaaaaccgttccaaaagtttacagcgtcaacaccattgatcttggctccaccaattccgacgttcatcctccattcaagcgccctgtgggggaacgtgcaggaaatactgccctgaacaaggtttacggtaaaaagatcccctgtgaaggccctgccctcaaggccttcaaaccttccggttccaacatcctggttcaactggatcaagctgccggactgaccaccacggacggcaaagaaccggcccagtttgaaattgccgggacggacggaacttatcatcccgccgcagcggaaatcataaacagaaaaggcaacacagccgttatccgcctctcatcaccggaagtaaaatcccccaaacacgcccggtattgctggaaccgtttcgtgacccccaacctggtcaacggcaaccagctccccgcccgtcccttccggacggacgaacctgttctgaaaaaataacttttaccacaccatcactccatgaaccttcatcttatcctcgcttctctgacagccacactctcactgggcattgcggcacaagctgctcccgccaaagtagcctgtgtgggggacagtatcaccttcggcaccggccttaaacccggagaaacccggtatccgcaagtgctcgccacactcatggggccggactttgacgtcagaggcttcggcaatcccggaaaaacggcaggcgactacccgggccaggcaggacgctggtacggcagcaccagggaacacaagcaagccctggaattcaaggcggatatttatatctgcaaccttggcatcaacgacacgggccgctggtggaaccccgaactgttctccaaaggctatgacgctctgcttcatgcgtggaaaaacgccaatcccaaaacacggttctttgcctgggggctgctggggccggactaccgcggcccgctcaacaaaaaggcatttcccggcaactgctatccggacgtacgtaaatatgcaggctcggacaacggctcatccgccaaccgcccggaagcggaaaaactgatcgccgccgtagcgcgcaagtacaaagtcagtctctttgacgcgctgcacccgctctccgaccatccggaatggtacgttgacgggttgcaccctacggaacagggcgcacggcgcattgcggaaatcacctttgccaagctggcaaaaagcctcaggcttaagcagcccgcccccagattggaaccgggcaccggcaacgtgattatcaacaacccaggcaactccggcatccttttggatggatggaaactgacggacggaaccaatacgctcatctttgaaaactccaccgtcattcatcccaaggacaggcttatcatcgccattggcccggaaactcaaaaagacccgaccaagcccctgcaaatcaagtcctcccaatcccccgcagctttccgcctcattcctgcgaaaaaatattaaaaacttccagaaccgcttatgggaacatgcggaactcctgcatgttcccataagcccggcacacgctattccgcccgcacacacccgcggcaggcggcatgactgcgtcacaggcagtttccccgctatcccggaaactcatttctatcctgttttaattgagcatttctgtctccaaaacggtctacagtgcatggaacagaataaaagcaaatcatccgcatgccgcctgcttggccccctggccaccaacaccagtatggacttcggcgttctgttgctgcgcctgggcgtagcagtcatgatgcttgtgcatggcattcccaaactgggcatgcttatcagcggaaactgggcggcgttccaggatcctctgggaatcggcaattttctgtccctgctgctgtgcgtaggcgcggaattcggatgttccgtcctcctcttgctgggattcctcacccgtctggccgcccttatcctgattattaacatgtgtgtagcgctctttcttgtccttgggctttccggctggggagcgcaggaacttgcggccatctacctgctgatctatctgaccatcttctatacgggaccgggcaaattctccctggatgcctggtggctccggcgcgactgcaagatagaagtggaatgaaaacagctcctcccgcgcggtctatggcaaaaatacttcttttttcactcgccgcggagggagccttcctctaggatgctggtacacccagttcatccgttcaatgtccggcaaactaacctacaagcaatcgggggtcgataccaaagaagcagccgcttttgtatccgacatcagctctcacgttaaaagaacgcaaaaacagagatcccttcaccaggcctttggccttttcgccgctgcctatgatttgagttcctataaggaaccggtcatcgtcaccgggtgcgacggcgtaggcaccaagacggaaattctctttgaactggacatggtggaaaccgccggcaaagacctggtggccatgaacgtcaacgacattcttaccacgggcggcgacccgctccttttcctggattatctgggcatctccaatctggaacgggaacgctcccgcatcacccgcctggtggccggcatgtgcgactacctggaatcctgcaactgcatcctggccggaggggaaacggcggaaatgcccggtgtggtgccggaatccatcgtggaactctccggcttctgcatcggctgttgtgaaaaaagcaaactgattgatccgaaaaccgtccggcccggagacgtattcatcggctacaaatccgacagcttccatgccaacggctggagcctcatccgccgcattctggaagaaaatccggatgtagttgatgaagaggaactccgttcccttcttcagcccacccgcttgtaccatgacgtggtggcagatatgcgccgcttcaatgtcaccccgaaggcatacgcccatatcacggggggaggcctcccggaaaacctggaacgcttcctgggcgactacggcgcagacctctccattccctattgggacaacaccgccgcccagaaaatcctgaagcatgtggatccgcaggaccgcttcaacacctttaacatgggcattggctgggtagctatcgtgagacctgaagatgcggaagccgcattgaaggcaggtccgggcggcacggtcatcggcacgctgagagaaggccgcggcattcatgtcaaagtacagggcgaataaaaacaccatctccttgcaacggatacgccacacttacaggacaatcttttcatcatcatcccatgagcgattttcttaaacacgagtgcggcgtagccgccattcgtctgcttaagcctctctcttattttcaggataaatacggctccaccctctgggcgttcaacaaactgctcatcctgatggaaaagcagtacaaccgcggacaggacggcgcgggcataggctgcgtcaagctgaacatgcccctggggcagccttatctgttccgcacccgggacgccagcaaagacgcccttacgagcatcttcaacgggcaaatcaagaagctcaataaaaaagttcgccgcggcctggtcaacctgaaggatgcggcagacatcaaaaacaacttcgactacggcggggaaatcctgatggggcatctccgctacggcacctccggcctctttgacgaaggttcctgccacccctacctgcgccgcaccaactggccgacccgcaccctgatggttctgggcaacttcaacatgaccaatacgccggaattgaaccagcgaatgattgaacgcggccagcaccccgtcttcggaacggacacgcagactgtccttgaagaaatagggtatcacctggatgaagcccatacggacctctaccgcgccttgcgggacagcggcatgcccggcccggaaattccccatgccatttcctcccggcttaacattcaggaaatcatccataactccgccaagcaatgggacggcggatatgccatcatgggagccatcggcaacggggactacttctgcctgcgggatccgcacggcatccgcccatgccactacctgattacggatgaattcattgccgtggcttccgaacgcgttcccctgatgaccgtctttgaagtggaaagcgaacaggttcaagaacttccgccggccaatatgctctccatcaaagcagacgggacacatgccattacggaatttaccacccctctgaaaccggctccctgctcctttgaaaaaatttacttctcccgcgggaacgatcctatcgtttaccgggaacgcaaagcgctcggcgcggcgttgaccccccaaatcgtggattctcttgaagaccgttttgacaaatccgctatcacctacattcccaacacggcggaaaccgcctactacggcctgctggaaggcttgcgcgtctaccgccgcaagcgcgtgcatgcccagctcctggaggccctgagaaacggcaccctggatgaaaacatgctggacagcgctatcctgaaacgctggccgcgcggtgaaaaaatcgcccacaaggatatcaaaatgcgcacgttcatcacgcaggaaaaaagccgtgcgcagctggtttcccacgtatatgacctcacttacggcgccgtagggccggaagatgtactcgtcgccattgacgactccattgtccgcggcactacgctgagaaggtccatcctccgcatcctgggccgcaccaatccccggaaaatagtcattgcatctactgccccgcaaatccggtacccggactgctacggcattgacatgtccgagctgggcaacttcattgccttccaggcggccgtctccctgatcaagcagcacggacaggcccgtctgctggaagaagtatacaaggcatgcagggaagaactggccaagcccaaggaagaacggcgcaattgcgtgaaggctatttacgaagggttgactgaggctgaaatctcccgggaaatcacccgcctggtcactccgcatgacgctccgtgccccgtggaagtcattttccagaccatcgaaaacctccatgaatccatagaaggcccctgcggcgactggtatttcaccggagattacccaactccgggcggatacaccacagttaatgtggcatacatgcgctggtttgagggtaaagggggccgtgcatacgatttgcccttgtagcggctccctttttttgggtattctgccgacaacatgtcggcacccatttcatacacgaccttggaagacaccgaactggtcgccagggcacgggaaggagattcgcgggcttttgacgaacttgtcattcgccacagccgcaaactccatgctaccctgtaccagatgacggacaactacgacgatgcctatgacatcgcccaggaagcgttctccaaagcctaccgggccttgcgctactttaatggacaaagcgccttttacacatggctgcactccattgccgtcaaccacgccagaaacttcctgaaaaaacgcaaccgcagaatgacctacagtctggacgacgacgagtacggcgaccatacggaaaaggacatgaacatggcggatgaaacggacggggcggacccggaacgccgtacccatttaaatgaattgcagctcaaaatcaacgaagcattgaagaaactttccactaaacacagggaagtcgttgttcttcatgacgtaaaagggctcaaccatacggaaatatccgcccttctcggtatctctgaaggaacgctcagatcacgtctgcactatgcccacaaggaactccaggggctgctggcggaatatctaagttaatcagggaaaaaaatattgaacgtcaattcccgccgccatgtcaaacgcatagttccaaattcgggactgacacattctaacttctattatacttaacatcaacgacgatggataaacaatccacagatcataaagaggaaactctggtggccatgctggcatctttccgcaaggaagcctgttaccatgacaccttcgaggaagatttcctccgcaattttcatctcagaaaggaaaccgatcaggctgcccactctgcttggaaattgctgctcgaacgcctggacaattatctgcagaactttcgtggttggcagtgggtctatgcttccatgtccatcgtgacattagctgcggtaggcgttattatcgcatccggaaacatggatgaaccttctgaatcttacgtatcctccaccaaggataaggaagaaatactcctgacggaaaaagccgttcccgtaagtaaggaaactattgaacgaacctcaaccgaagttgctcccacggaaaaacctgaattcaccacgggagactcttcatatgaaacatcggccaaagacaaccagctgaaacctgattcccatgccgataaaaaaccggtatcccgcgttctcattgagatgtaacaatccatgatggacctggctccgatattgacgggcatagccgttgcaggcctgatttgccaggcaacggccgtgcctgtcccttttaaggtagaagccatcctcccccaggcggaaggagcgccgtatgcgaccatggcggcgcaaatcggtaaagacatgctggcctccttgattccctaccgggttttaaaaaacggaggcgtgacttaccatctcggggacaaaagtaccccgccccttcaggtttgggcccaggaaaagctcacaggcctgacaatctttaaggtggagccagcccgtatatacgacgggcaggcagacctgacccctcccggtattcttaaacgcggcgacaaactgtcctttgccagcagcaaaaatgagaccacgcagggaatttacgtgggcatggaacattccatcggggacaccagtttccccctgcggctcatccgcgcccagttccccaagctggcagtcccccccatcggccaaccatgctacgactctgaaaaccgtctggtcggcattgttctgggcgtttcccgcaaaggaacctgccacctgctgcccgcccgtgccatctccttcctggcaactcatccggaagccaaaagagtgcgcctgggttgcctgctggacatcaactcctcaacccccgtcattgagggccttatcaacggaggtcctcttgcacggggaggaattcagaccggggacatcctcatcaacatcaacgacacgcccattcgcaactacggagacatgctggacgccacttattacctaacaggagacaaacctctgtctatcgaagtcatccgcggcacccaggtggtaacaagcaagggaatcctccccacgcaggatccccgttaatccaaatccgggctccaagtaaatgccagggcttcggccggctcccgctcaaaatcgcccagaaccttctttcaggcttgaactcgcccgccggcgcacttaaaaaagggcgtgcttcaaatcgtcttcaataaaatcagcgctgcggaagtatccagcatccccaccttggaacagttggatctgctcggagacttccaagtctcagaatccaccctccagaccctggatgacgcccgtttcggcaagatggaaaaggatggtaaaattctttatcgctacgtcgccaaagattaccgcatttactttgaagtcatcgaaggcaaagtgatcgtccaccgcgttctgcacgccaacagcctgaacgatttcctgttccgcaccaatatttccccgactgccggggaagatgaaatcctgagccagtccaagcacttctggaaacttatcgacgaaggcaaaaacgcctccaaagcctgaccttttcccattcatggcctgcatcattctgggcgtcaccggctccattgccgcatacaaggcggcggatatcgcttccgccctggtcaaatacggtcatgaagtgcactgcgtctgcacagccaaggcccttgaattcgtcacccccctcaccctgcacacgatttcccgcaaccctgtcttttcctcctttgaggatgaaaagacggactgggttcccccgcacatccaactggcccaacgggcggatcttctgcttatagccccagccacggcaaacaccatggccaatttcgcccatggcttcgctccggacatgctcagttccctctacctggcttgccaatctccagtgcttatttgcccggctatgaacgtccacatgtgggaacatgcggccacgcagcaaaacgcggccgttctgaagcaaaggaaggatcattacatcctcggccccagtgaatccggaattctggcctgcggagcggaaggcgcgggaaaactcatgccggtggacaggattattcaaaaaacactctcccttctgccgtaaggacggcaaaaatcgctccatgcctgtttattggtttgcccccggagaactaaatcttctatcatggatgcatatgaaaatgctcctgttcctcttcggttccctcatgctctgctcctgcggtccggataaatatcccatcagctttcatatggagacgggagcgacggacagcaaaaaattcgcctttgaaagggacggccattactatagcaaggccccctttatttcccataaggacattgaatcctattattccttccctgcgccggacaacacctacggcatcgtcgtcaacgtccggaaaggcctgggcagccgggtggaaggaataaccgcctccaacctgggcaggcaaatactgcccatcgtcaacggccatgccatgcagcccctgcgcctttacagcaaacctgtcacctcaggaaaactggcagtcatgggagggttctccccggcggatcttgccgccatggcggaatttattcccccggcggatcccaagagagaagaacccatcaacaaactggccgccgttaccaagcctcttcttcccagcaaggaccctgctcaggaaaagaaggaggccaaagaccctgaagaacacaaagaccgtaccgtgatcagcacccgccgggggcggatctgagccagcacccctcgtatcagcatgcacggcaaatcctttcctctcctgaccggcattctcctgttcctttggggcatgccattcctgacggcggatattgtagtgcgcttccccacggaaaatacagccctgctggacaaccgcccgcaggacttttacatgtatgtagaccgcaattttgaagggaagaaatcccagccgtgggaagctggagcctacggctttacccggaccctcgtcagaacccaggcaggccccgtatccgtcaaatttcatgagggtatcgacattaaacctctcaggagggatgcttccggcacgccgctggacgacgtgcaccccgtagccggaggcacggtagtccatgcctccgccaaccccacccatagcaattacggccgctatgtggtcattgagcaccagctgaaggacggcccgctttacagcctgtatgcccatctggcctccgtctcctgcaggaaaggcgaccgggtaggaaccggaaacgttattggaaagctgggatactccggggtgggtttgaacaaaacgcgtgctcatgtgcatctggaactctgcctcaagctacaagatgactttgaaaactggtattccagtctgaaactgggcactcccaaccgccacggttcctataacggactcaatctggccggttttgacccggcacccgtcctcctgcaatgcaaggacggggcggaattttccctctctcgccatatctcctccctgccggtccaatacgtcgtgcggtctccctcttccggcgaaccgcccagccttgtcaaacgctaccccttcctgctgaagccggggccctccgaccccaaatcctgggaaatcagtttcacgggagaaggggttcccgtttccgtgactccttccagccaaccgtgcacggaacccgtcgtcatccgggccgttccgcatcctttctcccaactgtacaggacctgcaatcgcgtttccggctccagcaaggaccctaagcttaccgccgccggcaaacgctacatccggctcatcttcatggggcctgaatcataatcctacgatgatgcaaaccttttccagcttccgttttccccatgccgttctcacatcctgcgcggctgtcctgctttccctgggcggcgcttcccctgcagctgccgccccctctgcgggagacacctttccgcaggacaggcaggacctcctaaaaaacaaaaaataccagcagggactgaaagcccttgaaaaccgccttcccctggaagccagcaaacacttccaggaatgcctgtcttcccaaaaccttgcggaatcacaaaaagccataatccgcccttttctggcagaagccctgatccgcgccaaaaaaacggaagaaggactgaatgcctgggagcagctgccggactctcccatgaaatcctactggacggcggtaggcctcttcaataaaggctcctttaccaaagccctggaaaaacttaccgctatcccggaaacggatccgctttccctctacgggtttcaattgaaagcccagcttgcgcgccagcttcaggaccggcagcttttactggaaaccctcagcaggctggggcaggcggaatcccccgccgtttcccaccccgcgcgccttcttctgacggatgtactggtgaatcagaaatgttaccagaacgccgccgctattcttgaacaactcaaaacggaaacggaagacgggacggacagcaaccggctcatacgttcatacgccgagctcatagaaggcaagctggccggcaaacagggaaatctggaccaggccatcaaaaccttctccgccgttatggacaacaaatcctatccggaaaaaattcgtgatctgggccgcctggctctcgccaaggcggaaatagcccgggaaaaaagcaatccggaacaggcggaagaggaaacgcggtcccagcctcaggaggaggaagctccgcacaccgccggaacggcggaggaacgcctgttggcgttcattggcggcaaagcggaatccgccttgctgatggacgccttcaacattctgctggaggaagacatctttcgaaccaatccccaggctctggaaaaactcaacggctgggtaaaagccagggatgcatcccgccagccggcagccatgtatgccatgggaagccttcttctggaaaaagatgatctgtcaggcgccgtcaaaatggcggaagaggggctctccaaatatccccagagccttcccgttcaaattctttctctgaataccattactgttttgctggataaaaaccgtctgcaggatgcggaacgtcttatttccaaatatcccggttcatcccctgacctcgtctttcaacagggagccctggctttcctcaaaaaagactactccctggcgcagaaacttttccgggaagcggcccgccgcgcttcggaaacaacggcggaaaacgccttgttcaatgaaaacctggccgccctgaacgccaatgacgcctccggagctgccgctctcatcaaggaagccgcaggctcttcccggctccgggagagcatcctctttgaacaggcccattacgccgctaaaagaatggcccctcaggctgctgaattgctggcaaatttcataactctggcggaaactccggccctgaaaacccaggcgcggctggaccaggtggaagtagccctgaatctcaaccctccggatctggaaaccgtgcaggctatccttcccctgttggaaaaagagcagttgtctccggaacagaccatgcagctggcgcggctgaatattctggaggcggaaagccggcaggaatggcccaacgccattcagtcctgccgacgagccattgccctggattcggaaggcaaacaggcggatatgctttacctcaaactgggagagcttctgtacaaaaacggagacttccatgaagcgcagcttgtcctccagcccttcccctccaaataccctgacagccctcttcaggcggcagccctctttctggcaggaaaagccgcccagcaaagcaataccggcagcacgctgaacgccgccctgaacatcttcaaaaccctaggcacgggggacaccccctttgcccagcctgccagaatagaagaagcctccgttctgctgcgcatggggaaagcggaccaatgcatcgccgccctggaaaacctgctttcctccccattgccgcgctacatgcgcctgctggccctctccatccaggcggatgcctgggtagctaaggaagatacccattcggacactctttgcaaggccatcaacctctgtacggaaatcctggacacgcccaacctgggactggcctggaaattcaaggctctgacccagcgggcccagttctatgaacgaatgaacgaacaaaaaaaggcactggatgactatgcctccattctggcccatacgcccagcggaagttccgccaacaaacgcagggactggcactggttctacaacgccggcttcgcctccatccgcctgctgggccagcttcaggactgggacggagccctggcgctggcaaaaaaactggcgcagacttccggccccagagccagggaagcagcggcttacgcgcgccgcatccagctggaacatttcatttggcaggatgaaccggaagcctccgcgccggaaaacggaaagccggcaacaccggatcaaactgcggattaagaaacctttcctcctgccatggataccccccccacagcaaaaaactggagactcaacgcagcagccatcatcatggacgctgaaggctgtgtattgctgggcaaggacagcggccgcaacccgtactggcactttccgcagggaggcgtcattaaacacgaaagcattgaacagactcttgcgcgggaggtatgggaggaagtgggcctgcgccccacggaatacaccattgtcagccgcctgcccggcctgcgttacaaatacccttccaacaaccgtaaagttacgcgctggataggccaggaacaaacctactttcttgtgcgctgcaaaaccagacgccctaaaacggatttgcaccgcagccccgaattttcaaaaacgaaatggattcccctccagaatctcaaactggaaatgttccccaaattcaaaaggaaagtcatcaaaaacgcccttcagcaattcttcgggcccggctttccttccaaacatgccgctgtgaaaacatcttccccctcctcaccctcatcttcaacactaacttcgcgtacgatgaaccgttacctggtgcctccgggcaaaaaactgcgtttaaaggattattctccggatgacaaatctcttttctccggaaccaaggaagaatccctgattgaattcgacaaactgagggaagaactgcaggaactgcaaaaaaaactttttgcccagcacaagcacaaaattctggttattcttcaggctatggatgcagggggcaaggacggctgcgtcaagcatgtcttctcccgggtggatccgcaggggctgcacgtagtacccttcaaaaaacccactactgaggaactggaccacgatttcctgtggcgcgttcacaaagaagtccccgccaaagggcagatcgccatcttcaaccgttcccattacgaagatatcattgccgtccgcgtgaaaaaaatcttcccggacccagtctggaaacgccgctacaagcatgtcctcgactttgaatccatgcttgcggaagaaggaaccgtcatcatcaagctattcctaaacatctccaaagaagaacagaaaaaacggctggaatccagacttcaggacccggataaactttggaaattctgcatggatgacctggatgaccggaatcgttgggatgaattccagacagcctaccaggatctcattgaaaaaacgtctactccggaagctccctggtacatcatcccggcagaccggaaatggtacagaaacctggttgtcgcccgcctgatggtagaaaaactgcgccatctccagctttcgctccccactcccaactttgatcctgcctccatcatcattccagattgataaaatctgtcataacgataactaatttgtgcatcgtaaaattatttttgtacatttctcggtattccgttgtcccattattacaaaatctgcattattcacaataacaatcaaaacttagaatttctaacgcttgactgttctagtgaaaaattgttagaaaacaacttaacgcctagaacgtgtaaacattctacatagaaaaacaaaatcaaatgtatttagcatcccaacgcaaggagttcattctgaaaacgctggctgaacatggagctgcaaggaccatcgctctggccaaacagatgaaggtcacggatgaaacggtccgcaatgatttgattaaccttgaaaaacgcggcttcctcaagcgcgtccacggcggcgctctggcgcttactcataaatccctccatgaagacattgtcactcaagacgatgtgtctatcaggattgcaaaaaaaaccgttcagaatattcccgcttccgtggttatgttcattgacagcagcaccatgggctaccaaatatgcaaccacatcaattccaaggatacgcatgtggtttccaacaaccccacgttgctgacccggcttgaaggcattccgaacctgagtttctattgcacgggcgggcacttcgaccgtgaagccctggtctatgtagggcaggacgccgccaaggccgccgggtccctgagcattgacatggtcgtgctgacgccggactgctactcccccaagcatggcgccggatacaagaacatgctgcaatccgaattcatcaagagcgtcatccccgcggatgccaaggtaatcatcgctatgccttccaccagcgtagcgaacaacccggcattctataccgttgcgccctcccaggtttccatgctcatcactgatgaggccctttctccggaaatggccgaccagattgaaaagagcggcgtcaaggtggagctcgcctgacgccggcctgctttacagggggcggaagttcttcggaacttccgccttttttatgatgatcatatactctctcctttccattccgtccagtactcccggcttcccgtcagctcatactccctggagccgatttcttcaaaccctccgcgccgatagaatgcgcgggcgtgggcattctcttcataggcccctaccgtcagcattcccttgcttgttccttcacccaatccggcaacgctgtgcctattccttcacactggcgctccggcgccacaaacagagcggcttcttccccttcccccaccaggcaggcaaacccgacaacacggccgccgtccctgcacatccatgacccttacgattacttaggaatgcacccttaccgtgatttatggccggtcacaccatttttgagctgataacagtttatacttgaccatcccctgaatttatctaaaaaggaaaatcgcttatttagtatttgaaaatgagtaaaggtaggcttgtttcagaattgtataaataaacgaaaaacaccatagattttctgcaataaacatggaaaagattgctgcttccctgttggcgacagctggtattgcctgcgcccaaacatacaactacgattcctcctctgaaacgcttgtgataacaggcaagggcaatacggttgccgaccgcattactccggaagaccccataacccccgggagcacagtccctgggacttcggaaatattcggagacacaaaagaaattatcttaaaagacgtttggacatctccagattcgatccgcattaaatatgtggagccgacttctgcgggaaacaacacgacgctgaaattggaaaattcgtgtttgaacgcatcgggggactttgataaaggcggcacggggttaatccttattttggattcccaatccaatcttactctgttcggaaaccgcctcaccaacacaatcagaatcgaaaaccaaggccgcataagttgcatcaacagcactgtaagggaaaactcgtatttgtgggacaacaagacaaccacaggttcttcaggcgttctgggcggaagtggatattatagcttcgggaacgtttcctctatcgagactaataaagatttcggactcatcaagaccagcggtcaaattacagacctcgaaatttcgggaatttacactgtggacgggaattccgcaaaaacaatcggcgacgactcctacatcgtgggtgtgaacacgtcgagcagttctgacgggcaggcgatgacgatttcgggttcacttacaatcaatgcaaaacaaggcacggggataggtatactggccaaccagctcggcagcgacgacgtttcgctcaaaaatgactattcgggccaaatttacgtgacagcaaaagacgccttcggtgtaaaagttggtaaaaacgcggccatggacccctctgctgcgggcgacatctactcgctttccgtgggcgaactcgacatcgaaagcacaatcacttcgggcagcacgcagggtgaagcaacgggtatatacgcaaaaagcgtcaagcgcgatttgacagcaaatgcaatcacagtaaaggggtacaccaatgcaaccggtatccatctgacggaaggcggccgcaacctcaccatatccgatatgcaagtaagcgcgggaatcagcggcaacgcagcaggcataatcgccgcgccaggcagagataaccctgtttccacagccggaaaactcgaaaacatcaggatagataatttggaggtttcaggcggcgcagatgccacgggtatctttgcaaactccattacaaaatcgggccaaagtgaaaacatcataggcaacattacggtttcgtctgaaaacggattggcaaccggtattttcgccgataacgctgacatcaacctcggcggcagaatcctatcctcaagcgcacgcttcaacgcctacggaatttggacggaaaacgagctttacttaaaaatgttcgatggttcggaaatctcggcaatcgctgcaaacgaacactccatcgcccaggcaatccgctcgaaaaacctctatctgacattcgaaggcagagcgacgataaacggcgacatcatggcggacgccggcatgatgctagacaacggatacaatgtagtcgtcaacggcaatatcgagggtagccatcttttcacagaatcaacaatcggcacggtttcaggcaaaatgaaattcgactcggttgccggcctgaacattaccgcatcagtgggttcgctcgaaatcggtacgtcgggccaggattcggggtatattaacgtcaacacagtcgagacatcagcaaacatttcaaacgccgttttggtgacaatcgaaaacgcaaacggcaacgtctcgttcaactcggttaattcggcgacggtaaacaacgccgttggcgacatctcagcaacaaatgtcactaacggactggtagtcggcgatgtcggcaacatccgcgtaagccgtacgaatgtccatgtgcttgacggcaaaactgtgagcggcgacatcgtttcgacgacaaacctcatactgacaaacgccggttcggcaacactcacggggtcagtttcggcgggcgggaacagacttacgataatcagagacttcggcataaactcctcagccgcgaccgtaatcagcgcggggacactcgcgggcgcgggcttgcgcggcaccatcaacaaccactacgacaacatcttcggtttctccgcaaccgacgactcttcgggaagcctcaccgccgcaaccgccttgaaaggcacgcacgacgtcgtctcgaacaacatttcgggcatgatcaacggcgacttggatccttttgaaaacacctacatcaccgtgaagtacgtcaacgtcggcagcaatgtcggctacgaaatcgagaagaacacctatcttgccgaagcagttgcgacaaacgaatctgaaaaggcgttggcaaaaacctacgacgatcttgaatacatcgacggcgacgacgcggcgaacgaggcggcagttaccaaaaaacgtaatttcgccgcaatggtaaaaagcggcacactgggtgcgatacttccgcagtcggtagtgcacagcgtgcgcatgaacatggatcttgccgacataatccacctcgacacgctcaaccgcacgagcgcggcaatcgacggcctcggcgcaaaaagcagcggcacggaagtttcgggggggcgtttttcaggcattaccgtccgcaacataaacaggtttgccacctacggcggcgatgaaaacatggatgggtcgagcgactatatttcgggcggcttggtgaattttgaatacacggcgggtaacacgtttcttgcgggcttcggcttcggcggttttcaggcaaaatcgtcaggcaagggcaactgcggcaaggcggaaacccaaagccttgcggtcaacgcctacaccgactggcggttcttcggcaactttgactggtacttcggcgcgacctatgctttcggcatgaacaaagccgaaaggatgaacatcctgaacaaaagcaaagccgattggaattcaaacctcatcggtgtcttcacgggcgttcgatacgcgtggaagccttttgccgacaccggattttacctgaaacccacaatcggcgtaaacgcggacttcctgatgaacccgtcgttcacggaaaaaagcggggaagaacgcatgagcgcggaatcagaaaactatacaagcgtaaagtcgcttgtgggaatcgagggcacttacgcgttttcaaacggcttctactttacgggcagaatgttctacacgcacgaattctgcgacgaccgctacggagtaaacgccatgctcggctcttccttcataagggtaaggggctggaaaatggacagggacgctggcgtattcggcgcaggcatcggatacagcatcacggaacagtggagcgtctatgccgactatgccgcggacgtttcggacaaagtgcgccacaacgtcaatatgggcgtcacgtttaaattttaagtcgattcgcgaatgagcaaaaaatctgcaatatatttctgccgcaatagaatcgcctcataaacatctgtaaaagcattgatagggagggaaccgctgttactgagctccggtgtcatggaacacaaacgactttctgtaaaagcgccccagcctctcagcccttccattctggcctgtacacgagcaccgggccggtacgcgaagactgaacgccgcgcaccttccgaacggcggagcccaccagggcggcagcctgttccacctcctcctgcgtcgtcatgaaagacagggaaaaacgcagggaggaacgtaccgcctcatcagacaatcccatggccgtcagcacgtgggaaggcatcggctgcagcgtatggcaggcagacccagccgaacacagcaggccggcaggttccagcaacagcatcagcgcttccgccgtacatccgtcaaacgccagattggaagtattgggaatacgttccgttccgccggaatgcaccgtcacgccgcccgcctgtgcccgcaggagagactcaaaagaatcccgcatccgggacagccgtccggcgtcctcctccaagtgcctcaatgccgcccgcgccgccgcaccaaaaccaatgattcccggaacattctccgtgccggacctcaaaccgtactcctgcccccccccgaacagcaaaggggaaaaaggagcccccgctctcctgtacagacatccaatccctttggggccatggaatttgtgtgcggatacggaagcataatccacttccattccatgcaaatccacgggaatttttccggcgcactgcactatatccaaatgcacgggaactccatgtttcccggcggaggaacacaaaaccgccgcatcctgcaatgcgcctgtctcattattggcccaggcaaaagaaacgccggacacgccccctgcgcacatggactcccatttttccggaaccgctcgcccttccctgtccacagggcagacacagccgctgcccagggccagggccgtcttcaaggaggcgtcatggtccgtggacaaaacgcctatccctccctcccgctccccggccatctggcggaaagccatattagacgcctccgttccgccggaagtaaatacaatttccgaaggaaatgcgcccaacagggcggcaacggccgcacgggcctcctccaccgcctcacgcacatgtctggcacagccgtaaccagcggacgggttgaaaaaccgttcttttaaaaacggctccatggcctcgtaaacctccggggccagcggtgtggtagcgttattatcccaataaatcacgccttcataactcccccaatcgcgggaaggagtcaagccggaacataatgcgcagctgcacaagatcactcttcacttttacccgtgattccgcataatgcctctcatgcgttttcttatcacggcaggccccaccagggaagctattgaccccgtcagatacctcaccaaccactcctccggaaaaatggggtattgcctggcggaagcggctgttcacgaaggccacagcgtccttctcatctccggccccacttccctggacatcccgcacggcgtggacttcctgccggttgaatgtgcacgggaaatgtatgatgctgtcaaaaaccaggctccctacgccgacgccgccatcctcagcgccgccgtagcggattatcgccccgtttccgttccggaccgcaaaatcaagaaaacgggggagcgcatgattttggaactggaacgtactgcggatattcttggctccatgcgcgcggaattcggcttcagaggcattctggtaggcttcgcggcggaaacccatgacgtggaaaattacgcgcgcggcaaactggaacgcaagcggtgcgacatgattgtggccaacgacgtttcccgcagtgacattggttttaactcctctgaaaatgaagtgctgctcgtttacccggaccggacggagcttttggaaaaagcgcctaaaacgcaaattgcctttcaaatcattgagcgcgcatgccgtctcgcacagggaaaagctccgtcatggcgcacggcagacccgttccacgcttgaaccggaagaaggtttgccccacgatccgatgtcggcatgtaaatgccggcggcctttcccaaaactacattttccattttcatgcccgtcactcttcaggatttaggctggaacgaccactttcaacgcgctttcgacgccgttgccaaaccaggctggatgccggggcgtcttatccgggaaacaaaaatcaacttcactgctcttctggacggcggggaagatgtggacgccgtcgtcagcggcaaactctggcatgatgcggcaacggatgcggaactgcccgctgttggagactgggtggcgattgatccgggagaagcgggagacgaagccgtcatacgctccattctcccgcgccagacctgtttttcccgcaaagctcctgggaaaagcagcgcggaacaggtattgggaaccaatgtggatatcgtggccgtagtgacggagccgggaacggacttcaaccccaggcgcatggagcgctactttacactcatccgccgcagcggagcatctcctctcatcctgcttaacaaaacggatcttttttccagggaggaagtggaaaaagccatgcagattctgcgggagctctccccggaatgcgccataatcagcatcagcgccctgcacaacaggggaatcacggaattccgcaaatgcctctccaagggaaaaaccatctgcatcgtcggctcctcaggcgttggaaaatccaccctggtcaataccctgctgggggatgaatggctctggacgggtgaagtcaatgaagtaaccggcaaagggcgccatacgacagtggcgcgggagctggtgctcctcaagcatggaggtttgctgattgacaaccccggcatacgggaaatccagatgtggactgatgaacataccctccgtgaaagctttgcggatttgacggagctggcccatgaatgcaaatttgcggattgcagccacggtaaagattccggctgcgccatcaggaaagccgtggacgaggggaagctggacaaggagcggtacttaaacttcctgaatttggaaaatgaaatcgcccggcttgccaaacgtcagaaaaaaaggcaaatgaacgtggaacgggccggaaaaagagaccggaaagtgcaggcccggaattatgaagaccgcgtggaactggaacgccgccacaaacccaaccaccgtagccatgactgattcaccgtcaaaattggcttgtcaaactgcaaaaacgcacctaatggtgaagaatgctattttcacgcaacctcatccgaactttcctggctcttctggcattgggggcgcttcccttatccgcagaagaacagccggttcctgctcaaggcggtcccgccgtgtccattactgacctgaagcccgtaaagctggagagggatgcccacagcaagcttcttgtagcgcaatgcactgtcaatggagtcccatgcaatcttatcgtggacacggcggcctcccacaccacatttgacatcaaattcatcaaaaagaattttcccggcctgccgcttgaagacgttcaaatcgcccccggttccaacgtccgtgccgcaccacggctatttgccatgcggtccttctccatgggcgggcttcatattaaaaacttcttcggccttgccctggatcttactcccctgcaaaaggacatgcaggtgaagatagacggcatcctgggcatcaactacctggggttctctccgttcctgctgtccgtcaggaatgcttccctgcagtttctggaacgctcccgcttcccccaacacaggaaaccgctggatgtggaacgtgatccttccggaattttttacatccgctgttcccggggaggagacactttcccgctggctcttgactccggctcttctctttccatggccccgctggaacagtggcccgcagatccggacggcaatcagctcaccaccaaggcaaccgacattaacggacacaatggggactgcactgttatgaaactgggtatcccctccacgctccgcatgggaccggacttccaaatggacggcctttccttcgccgtaacgggaacagggggccgataccagatcggcgtggatactttccagcattttgacatcatcattgatgctccgcagggggaagtcttcgcccttcctccccattccaggccggagccccaggggcaaaaagcccccgatatcaaacaggaatcttgagcatgatgcagatcatgcgaatggtccgggccgtagcgccgaaatgggccttcaacgccacctgggcgcgggaagactgggcatgagccagcagggggttgtccagcatctccttgagcacgtctgccaggcggttttcatcacacctggcaattccgtccactccttcaagcagctggaccagtgcatcgaaattttccatatggggccccgtcagcacgggcacgccacaggcgacggcttcagccggattctgtccaccgtccgccaaaaagctttttccgatcacggctacatccgccagcgcggtccagtccctcaattcccccgtcgtatccgcgatgtaacaaacatgatccttcagggtttctggaatctcgccatcagtccgcagcacgcactgccagccctgggcctccagttcccgcaccacggcatggcggcgttccgcatgcctgggcacgatcagggggaagccccccgccttgcgcgccgcttctgcgatcagaacttcctccccgtcatgcgtgctggcggccagcactacaggcttgccgcgtttcagtttgtccaaaatggaggcaaactccgcattagtctccctgcgctccgccatttgctggtcaaatttgatgcttcccgtcacgtggataatggaggaacgcacgcccacggattcaaacctccggacatcccccttgtcctgtacgcccattgcgtcaaggaaggaaaaataatactttgaaatccatttaaatgcgcggtagcggctctcggacctggcggacatacgggcattaatcatcgccatgggtatgccgcgcaccttggctgcacgggcaaaattcggccacaactcggcctccaccaggacaatggcctccggttcaaaacggtcaaaacacctccccggcagccccagaaggtcaaagggggcataaatcacgcgcacgccgggaatctgcgcactcactgccgtagcatgccccgtagccgtactggtagccagcacggcggaacctccgcgttcccggagccacgcccggagaaacttgagagccagcaccacttcacccacgctcacggcatgcacatacaacacccctttcggctcccggttataggagacccggtacagcccgaaacgctccagaagccccgtgccgaatccgcctctcctcttctgcttaagcagataggaaggcagcgttaccagccacccgacggtatacaggatattgtaacagaaggaaaacaggaaggctttcatcttacttctcaggcaattggtagaacagcagcatatttttcccgtaccggcgggtatccaccagattcaggccgtcaatttccgcggcgccttcccttccggtaccccagccctcctgcacttccgcaataaacacgccaccacccttcaaaagtccggcaactccggcctccgccagttcaacaataaagtcgcggtccgccggccccttgcaataaggaggatctgcaaaaataatatcgtacttcctgccggccagcagttcccttctcacgaactggacggcatctccctggatgacagttccgccttccaagcccgtcttgacgagattggccctggccgccgcgcaggagagacgggaaaaatccaccatgcgggcgtctctcgccccacggctgagggcctccaggccgaaggcgccggacccggcaaataaatccagcacgtcggcccggtccatcagcgggttcaggatggaaaaaacggcttccctgacccggtctgtcgtgggacgaacttcccccttgggaacagacagggttatgccgccggcctttccgctgatgatacgcattgttgtcttaccggaaatgaaaggaacatcatatccctactggcgagccttggccttggccttttccagcaaagggtcacccgcgatgcgggtaacgggaacacgcagaacgatggactggttggcaatggcaacgttgtccgggttcttttcagacatgttgtaaacgaaataggcatacttgccgtccttggtcttgcccgcaatgatagtctccgtcagggtggaaagaatggttttcttttccattgtccattccttgccactccacgcgccgtatacattcagatcgtcataggacacgtcccctttcagggtcagggttccgttgggagaaatccatgacttggtgctggaatcatacttcagcgtgctcatcggcaacggcccctgctgcgccacagcagccaaatcccagatattccgttcccccgaggcgaaaatacccagggccacaggggccacttcctgcacctgcttcagcttccagcactccaggtacttggcatattcgtccttggtccagcccaggcgctcatcataaggaacgggctggccggggacaatctggctgacaagctccttcttgtccttgtcgggcagggaggcgaaaacgccgtctatcttttccatgaacggctgcaggctttcatcaagcacaacgctgacggcggcggcttccgccattttgccgaccgggagatattcgtcaactatttccggcttttccgctgcggacagggaggaaaccagaacagggactatcagtgttaaagccagattacggagcgctttcataacgtgttcgtatattttactcaacaaaagacccttggcaagagtcaaagtgagtgttatccgtatgtacatcatgagttggaagttacttttcactaccctgtccgccgctctgagccttgcttcctgcgtgtccaccccggcatcgcgcatccagaaaaacccggcccttttcaattccctcccgcccagccagaaaacactggtggaatccggacaaattgctgaaggaatgtctccgccggccgttttcctggcctggggggacccctccgccgtagcggaaggccaccttaacgggaaatccgccacccgctggatttattcctccctccagccggtttacacccctcccccctctttctgggccggcccctactggggcggtccctactgggggccgggcttctaccgtccctattatccttattacaatgatgtcacctatgtgccggtaaacaccggatacgtgcttttcatcaacggcaaggtgcaatcttgggaacgcaggcgctgacggaaacggagcctgcccctatggcacggaatgcgccggcgcagcagaaggagggcaatctcccgctgatgcgccgtttttctctccgcgtttcctaatgccgctctaatccccgcccctggacagggggcgttccagtttctcccggaatttgggaaagaactccttcaattccccggaaaccttcggatattccagcctcatctccgccagggcctccacaatggcgcacaagcagacgagccgggaataccatttgttgtccgccggcaccacataccatggagcctcccgggaagaagtatggcgtatcatctcctcatacgctttctggtactggtcccagaattcgcgttcgtgaatatccccttcagaaaacttccaatttttgtccggagtatccagccgtgccaaaaggcgctttctctgttcctctggggaaaggttgaggaatattttcacaatgctcgtcctgttggcgagcaggtggcgttccaggttattgatggatctgaacctctcctcccagaaagcactcttggcatgggagggattaaatccctctccggccagaaactccggatgcacgcgcacgctaaggacttcttcataataggaacggttgaaaatgccaatcatcccccgcctggggaggcgcgctacgcacctccacagaaaatcatggctccgttccagcgtggaaggctgcttgaagctgctgactacgcacccttgcggattgacgcctcccatcacatgcttcacaatgccatcctttcccgcgctgtccatcgcctgcagcaccaccagcagcgcatgagactcgctggcatacaatacttcctgaagctgctccagcaattcgatgcccttttccagcttatccacagcctctttcttgctgtctttgcccagcttgccgagatcgccgggatcatagcgggacaacttgaatcccctgccgtccgtcacccggtacggttcaataaatttcctgcatcttttgaccaggcgggaagaaatatccatcatttctataatgacactgtctcttctcaaaatgttgaaacaacagcaaaaacatcaatacccctctcgttgggagattccaccccgccgatagacgacaaacccccggcataattcggaacgttcatacttgccggaatactctatggactggagaaaagcagcataatcggatggccgggaaactacgatcaccttataatcagaccatttgtcctttaacgggccgggaatccatccataaaactcctttccggctccattgcataaaagtaaaatgtcaacatgactgctctgcaataatttgcaataagataccgcagagcggaaatcttcacggccatacaaatcattgcaacgaatacgaatatcgctcaccgcccaaacaatcatcattaataggaacaggatagtttgggcaatcctggggaacgaccaatcccataacgccaccagggaccaggccagacacaatacaggcaataacggcgcgcaatgccgtccggaaaaacggaaatccatcatttccgttccataaaggaatacggcccctggaagcaatatcaacaccagcaaagcaggaaccaagggcctctcagcccgcttattccacaaaatgatgccgcaggcagaaccggccagaagaatggcgccggagatcatccctgcccccaatccgttcatattccataaagcatcaggagtcatgcacatcctcaattctagacgggaaggccccatgccggccaatcccgataactcgtacatggaagcgcatgcattgactatccaggaggaagatatggaaaccgcacgggcgcccaagaaaagagtgtaaagataatatgctcccaacccggaaaatggaaaaatccaccagagcagggctcgccgaaacctccgccctccaaactgccggaatgccatgaccatgaatgccgcggcaaaaccgagcgcccatacaacccctgtcaggcttgtaagacataaaaaaaacagagaaccaaaaaagacatggaattttaccggttctccccggctaacctgccaaaacaacatggagacagcgcaagaggccgctatctgcaacatatagggccgcaactcgttagaataataaacaaaaaacggtgaaatcaaaagaatcaccagcgcctttggttcctttctgaaaaaccaggatgataaaaatacccaaaatatattaaataacctcagcatccattcagactccgcacccgtcagatgatgccacaaaaataaaaggtagtaataaaaggccatttgagcatcgctaccgccaatttcacaaatcttcttccaacatccctccattccctgctgcatggcgcacaatgcagtacaacattcatcaatccaaaaactttggttattcagggaaaaaaagaaagacaaaaaaggtaaaatccaccaatatttgatgcccccgtcattgccttccggcgccctcttttgtcccctgcacatagtgcaaggcaacatagcggattgtatatccgccgcctgcttttttacaggaagaaatcacatatccatatgaatatcaatagataaatatgaaaatagatttgttttttcttcttatctctgcaactttgaaaagttattgatgtttttatcttagaaaaatatgttgccaccggatatacaatccgcaaaaaaatgttgtttatacggatattgcgtaaaataaaaaacttatccaccaaagcggacctgatctgatggggtattttccagcttgcagtcctcaagggtccatgtgcggggaggcagcaccttgttatctttaatcagaatattggcgcatcttctgaattggaaaggtttctgcccccatcccttaaactcgtcattgtaaatgaccttattattgatgaacttgaggttgtccgtggaaatggcgaacagcagcggcacatcgaacgtcttgaaaacattattttctatcagcacattgcgatgatagtaatccctctgcctgtccagctgcttgacttccgggtaaatggaaataatggcattcgtaaactggtaacgcgaggtcaggttgttaatgaatgtatttttgcggatcaccacttcatggcaggcgccgctttcataccacccctgggcatcccctgccaatagaatggcggagccggaggaatggtcaaacaaattgccctccaccagcactctctccggcgttgtaaaaagagatcctctggcacggttgttgcggacgatattgttgcggaaaaccacggaagggtaaaaatccgcattctccacggcatccccggccctgacggaggaggggagcggctcttccaccgtaatcaccatctccgcggaattctttttcactgccgtcttcacggtggccgttccgccgggttccagcgtaggaccgttgatgaaacggattttttcaccgggaagaaacacctcaaaccccaccgcctgccgatgcatgtatttgcacttcagggtatggctgtccactacttccatcacgcccaggcaggtggaatgaacattgatggcatcatccatcatcccttcgaacagggctttctccaccacgattccgccccgggtattggaaaaatgggtcgcgtccgctccggcggtgtgtacgcgccccgtgcctttcctgaccatgactccgccgcctttcatatgaaagtcctccgatcgctggaccagcagagccatgcctgagctctggtgcagagatacgtcattcagtgatgttttccgagcccggtacaccacgcatcccggatgggggcggttataattccgaagaaccagcgtatcccccggcttgattcccttctgcctgaggttccaggacaaacggagacggctcccgcccaacggctccacatgcccgttccagccgatgtccgatgtattggcgataatatgtcccgtccctttctcaaaggccatacagtgtcccattccttcttcccagcctttcccctggaaaacgaacctgttgttccggatttcgtaagggtaggcctttttgtctatttccacttccgtgaaccggtcatccgtcttcacgacgcgcgcctccgtacaccaggaccgttcgtaatccacggataaacggttgatgctgacattttcgctgtccatcaccaggaggggaaccaccttgccgtgaaaaagaaacagggaaccattgccctccacgcggacattccgcaaatcggccagaggcacacacaccggatgaatcagcggctggtcatggttggaaatatggaaactcatgttcaaagccccctccggataaaaatggtaaatgcctctggggatgttcaaaacgcccccgccctgcctccggagagcggaaacggcagcccgcagcgccggcccctgatcttttctgacgccgggaaccatgccgaattcagaggcattcaccacagctcctttcatcccctgcccacttcctgccgtcttccaggccagatctacccagtccgcatggtcgtaggaattattgtccacccggtcggccatcaggtaaagatgccgtatgccgttttccgccaccggaatggaaaacttcttcgcggccatccccctcctcatcacgccggaactccataaaacctcggacccgctcatcacgcggaattccacgcttccgtctccatccgcaccgtcatcaattccgcatgcaccttccagcctcaaaactttcgggttttccggaacgggcaggggaatcatggacgtagcgtgcgtaccgattcccgtggcatattttttgccgcctatgctcaaccccgcattactgaaagaccggtccaaccgggtttcccccgtctcctggcgagtcatcagcaggctggaggcaggaacttttacggctatggttccggattgggcagcttcttcctcgccccgggactgtgccgggaataatcccgccaaacacgctgcaactacaaaactccatgaaaacatccggctgaacatattttttatactccgttcccgtattccttctatcagaaaaaatatggatcgtccagaagcttccatcagagaaaaagagagattgccttccataccgaattcagggacactgtctccatgcgatcagcattcttcctactgcccggcatccttccggctctttccgcctgcgggcgcggaggcgccacgcttgaaacggataacgtccaagcggaatggttccccaacggcagcaaaacggcgattgtcctggaaggggaaagcgaacccgtttccgaacgggaaatccggcatccccattccggcatgactcttttttaccattcgctgggggacggcaaaggaactttggaaatcgcaggaggggttccggaaacggctacagtaacatacagccagggagcggcttccgcggagctgcatttcaaaacggcctcccgggaaatacttctgaatgacgtacgccgcctgggcgcgaacgaaaaaacggccttcctgaatggctggagctgccaggaacggggcacagccctgctccgttccgggacagccggagccatgaccacggaaaaaaacgtcccatgaatcttctgaggatactgaaaacgggaacatggaaaatcccgtgcgcgcttctgcttgccggggttctggctctggcatgcctccagtgctccgtccgctccctggtgtacctgccgccccagcccagggacaaaaccgcgtatctggaaaaacgggccgcctgggaaccgcatcggcgcaccttccaccataatggggccaaactcagcggctggcttattgaaaagaaggggcagcccctcctggtatattacgggggaaacgccatggacatctccatgatgcttccctacctggaccggtttccccatgccaagctcctggtcaattaccgcgggtacgggctcagcaccggcacccccacggaacaggatatcatgggagactccctggctattcttgactccgtgctgaaggaaaccggaagaacgccggacgacgtcatcctggtcgggcaaagcctcggttccggagtcgctacccagatagcctccgtcagacacgtgaaaaaactggtgctgctggtcccttttgacagccttctggaaactgcccgcggtctcttcccatacctgcccgtcaagcttctccttccggaccacttccggtcagacctggccgcgcccaaagtcgcctgccctgtcagcatcctggctgcgggagcggatgaagtcattcctccgcaccacgccaaacggctccgggactgtttctccgtaccggtcagttaccaggaattccccggagccatgcataataccatctggctcagccccggctttgataaagcgttttctcaaagcatcgggtactgatctccgttttattccgcaggagccagagacacgcggcgcaggcagcttccttcatgttccagcagcagccatgaggtttcttccggcagcgcttccggaaacaggttggcccattcgacaatgagcacagtctctccgtccagatactcttcccaccctatgccggtcagctcggactcatccttcaggcggtaaaaatcaaaatggcacgccggcagacgtccgtcagcatgctcatgcaccagggaaaatgtcgggctggcagccgcctcggaactccccagcccctccataatgccctgggtcaggtgcgtctttccggcccccagctcacccaccacgcccaaaatttcgccgggcattaaaattttacctatttgcctccccagctccctcatttcctccggggaatgagtcaaaacggggccgtttctaaaaattttatgccattcgctcatttttccatgaaattttgcttgtctaaaagaaagtcatatggtttattgcggctcccgcatctgcgggcgaaccttaacagtgatagcaatggcatacgcaattttcaaaacaggtggcaagcagtaccgcgtccagacgggcgacgtgatcgacgttgaatgcatcaataccctcgaagagggggccgaagcaagcttcgatcaggtgcttatggtggaaaatgacggaaaagtgaccgtcggcacccccatggtggaaggagctacggtctccgccaaggtggtcagccagttccgcggcaaaaagatcatcgctttcaaatttaagcgccgcaagggcttccacaagaaaaaaggttcccgccgcgccatgacgaagctggaaatcaccgctatcaacgcctaatttcaacccttaatttttattatcttatggctcacaagaaaggtcaaggttctgtcaagaacggtcgcgactcccgcagcaagcgcctcggcgttaaaaaattcggcggacaggaagtgatcgcgggcaacatcatcatccgccagcgcggcaccaaatggcaccccggcaagggcgtaggcatgggccgtgactacaccatcttctccctggtggacggccgcgtgttctttgaccgcgaaggccgccgcgtcaatgtggctccggaaggatctgaagccgccaactaaaatacggattactctatctccctgcaggggcggccatccacagggatgaccgcccctttttctgtccttctccgcgccccaataaataacaggaattgttcttgcaaaacaattgcccctcccccactatccacgcagagcatgaaaaataagatatgaatcccaaaacagattccaagcaggccgtccgcaccgcctctaccctgccggtcatttccgggttgagacttaccaagcaaaggcaggaagtctatcaggttcttctggaacaaagggatcatccaactgccaatgaagtttaccagcgggtacgcaaaaaactccccagcatctccctggccaccgtttataactgcctggaggcgctggtgaaccacggcctggtcaatcaggtcaactttgaacgcagctcttcccgcttctgtcccaatctcgttgagcacggtcacttccaggacacccggaccggacgcatttacgacatcaccatcaaggaaggcgtggacctgaaggaattcatcaacctgcccgacgacgtgtgcgtggaagaagcccaaatcaccctgaggggttccatcaccacgccgcagggctaactctctttcatcatcatgagtctggtcattaaaaatttgcacgccaacgtgcaaggcacggaaatacttaaaggcatcaatctggaaattcccaagggagaggtacatgcgatcatggggcccaacgggtccgggaaaagcactttatccaaagttctttgcggacatccggactatgaggtaacggagggggaagcctggctggacggacagaacctgctggacatgagcattgacgaacgcagcagggcgggactcttcctggcattccagtaccccatggaagttcccggcgtttccaacgccaacttccttcgtgcggccatgcaggcccgcatgccccatggggaggaactggatgcggtcaccttctacaaaacgctctatgcaaaaatggaccagctcggcatggcccgcaaattcacgtcacgcgccgttaacgaaggtttctccgggggagagaaaaagcgcaatgaagtgctgcaaatgcttctcttggatcccctctatgccattctggacgaaacggattccggcctggacatagatgccctccgcattgtctcggaaggagtcaactccatgcgttcccctttccgcagcttcctggttatcacccactacaaacgcctgctggactacatcaggccggatgtggtccacgtgctggctgacgggcggatcgtccggaccggaggcggagaactggtggacgaactggaaagcaggggatacgagttcctgaaagaagcggaaacagcggaaaaggcgtaatgccgccaatccggccatcaatcatgagcgatacacctgacatgccagagaacgggaacacacagaacctgtttgacttcgaccggagcaaggggaacttctccttcccggaacgccataaatttgatgccggatacggcctgacggaggccaccattgactacatctgcgacgtcaaggacgacccggaatgggtgcgccagttccgcaaaaacgcgcttgccgtttttgaaagcaagcccatgcccacccactgggcttctccggatattaaaaaaatagatttctcccaaatccgctactacctctccgacggagaacggcccaaacgaagctgggacgacgtgccggaggacgtcaagcgcaccttcgaacgcctgggcgtcccggaacaggaacgccagtttctggcgggcgtggaagcccagtacgactccgaatccgcctactccaacatgaaggaggaactccgcagccagggcgtcatcttcgtcaactccacggaaggcctgaaacaccatgaagacgtctttcgtccctggtttggaaaagtcattcccacgggagacaacaaattctccgccctgaacagcgcggtattttccggaggttcctttatttacgtgcccaaaggggttaaactcaaacatcctcttcaggcgtacttccgcatcaactcggaaaatttcgggcagttcgaacgaactctcatcattgcggacgaaggcgcggaactcatgtacatggaaggatgcacggcgccccagtttgaaacttccaccctccactccgccgttgtggagctggtcgcgctcaagggagcgaaaattcagtacgtcaccgtgcaaaactggtcctctaatgtcttcaacatggtcaccaagcgcggccttgccatggaagatgcggaaatccgctggatagactgcaacattggctccggcctcaccatgaaatacccggctgtggtgctcaaaggcaggcgcgcgcgcggggaagtcatctccattgccctggcaaacacgggccagcaccaggatacgggagccaaaatgatccatgcggcggacgatactacgtccaacatcgtttccaaatccatcagcatcggcgaagggcgcgccagctaccggggccaggtaatcatgggcaaaggactcaagggttgcaaaaacaacacggaatgcgacgcccttcttctggcggccaacagccgtacggacacctaccccgccatcacggtaaaaggggatggaggcacggtgcagcatgaggcatccgtctcccaggtctctgaagaaatgcttttttacatgcagcagcggggcattccgaaagctgcggcgatgtccctggccgtcaatggattcattaacgacctcgttcaggaattccccatggaatactctgtggagctgcgcaggctcattgatctggaaatggaagacagcatcggataaggagggaaacaatgaaccatttgcttaacgaagaacaattccccgcaggctttcttcccgcatggtttgaagcccggcggcgccatgccctggagcaggcggaacagcttccggaaccttcccgccatatggaatcctggcgtttcggagcccccggcaacgaatccctggaacatgttgaagcggctcctcctgcagctccggaaaccttggctcccatcatcagggaacgagcctccatgccggaggccctccgcattgtttacgccaacgggctccccgtttccatcccggaagaactgccggaagggctttccgtaatggatatggaagactttgtgctgcaatgcccggacaccgcccggaaatacctggaaacagagacggaaacgctcggttccgaaaaactgtcggcattggctacggccttccagcacaacgggctggttattatggcggacagggaaatctccctccctctggaaatactccacttcatctccggagataacgtggccgtttttccctccacgctgctcattgcggaaaccggaagccgcctgcgcattctggaacgccacattagcgcagaccatggccgccaattctgcggagcgctccagcagtaccatctttcctccgcgtcatctgtcaaatacgcactggttcaggaacttaacagccgttcccgtgccgtggagctttcccatatgatggcggatgattccgcggaaatggaacatctcgtcagccatcccggcgcagcatgggccaggcaggaaacggtctgcatcctgaacggagacggcgcaggagtccgcctgctttccgccaaccatctgaaggaaaacaaggagctggaccagagaacctaccagaagcacctttaccgcggagcctccagcaacctgctttacgccaacgtacttgacgacgaagccagcagcattttcagcggcatgatcctggtggcggaaggcgcgcatgacaccagcgcctatcaaagcaaccgcaatctcattctcagccccagagcggaagccaactccattcccggcctggaaatcctggcggacagagtgcagtgttcgcacggttccgccacttcctccatttctccggaagaaatcttctacctgctttcacggggaattccggaacaaacggcgcgcagcatgattgcccagggcttcctgaaacatgctttggaccaattcggcgatgaacccatacgtgccgcggtagaaagcctcatcctgccctgaccgctatttcatgaaacccaaaaagacggagagacggttccctatccctccttttccgtcctgatattaacgcgcctctgcaagagagccgtcacaagcagaaacagggccgttccccccatcatgctgtaataccattcacggtaaggcgtatggtactgaaggaggatttccgtctgctgttccgaatccggaacggaaacaagaatagaatagcgctcagtgccggataaaggaagctcttcccccttcccggtgcgggcgctccatcccctggaatagctctcaagaacagacaattcctttgttcctggcggcacggtgacatgaatcttattattcgttctccaatccgggacaacaggagaaaaatgactctcttccccctgggttcggacgaaatagcgtccacggtacaagggattttccagcaagaagaaatcttccgtttcctgaaccagaatccacccgtcaaagtctggttttccggctctggaatcgcacagcaaatgggaaattccggccatggcataatcttccggatgataatgtccatccgacaaaggtctcaaatatttgggctgtaccgtttcatagcctgaagccagtcttattccatatgtggataaatgattggtacatagaaaatccaagtcattatggggattgacgatgacaacggctccatcccccacatgaccgcggaactcgggcatccactccggttctctataaagacagccgctttccggtttgtcggaataggcaatccatgaagaagaaaacactatttgttccccaaaggtacataataccacaagtcctgcccaccacttcggataacggctggatatattcaggcgggaacaggcccaaccccctacgctgaccagtaaaatcaataaggcattgcgccaatcccaaatcatcagctggtccaggagacgctcgcttctgagcaaataccaggaatgacggtatttttgctgagaagtcgttatgtttccgtcaataaagctatgcaattttaacagcaatggttcatggaaacactgaactgccaccgatacggcaagccatatacacaaaattccaattccccaccatgcaagtctgcgccagataggaagaaccggatgccgcctaaggtcaaataactgccatccggcaagccagctcattccaaaagccatcacaaccgtggagcgtgaatagaggaaagtggaaagaggtgtgcatgaaacaattaaactgacaagaaaacaaaacttggcggtcaacggtgcccggcggttaaacaatgccagaacagccagcacaaaaacaactcctccaccaaatttgatatcgaataaatcagcgccaatcactttggaaatactgattgtctgaggaatgccgaagagcgtcggcatcacagatgtggccagaaaaggaatattttccagcccccagacaaacggcaagcttttacagccttccatgcgcggcagggtgtccacaaaaacatccaaggaaagcaacgccgccaaaaatccggagatcaaataaaaagatgatgatttcagaaaaactttccaggaccagcggtctgcccgtttccaccaatccgcaagaaacacgcacagcaccagaagaaaaacaaagagacacgcttgcaaatggcctcctctgaatccaagagcaataaagagaatagagggaagatgcacccatttgtttttccttctcccttccaacagggaccagacaatcaacggcgcccagattattccaccaagccaccggtcatatatccacataataaactgggaataaaaactgaaactcacagctccaagcaatacgtacggaatgggaattcccctggatttcagtagaatgatcatccccagccctgcgataaaaaactgcagcaagattcccgcatcccatgccgtccagaaaggaagaaaaccaaataaccaatgatgccaatcccccgggcttaacatggtattttccggcagtgaagtcccattgtgagtataagggttccatcccatatacccatcactttgccaggactgctgcatcgcccagctataaggtaaatattgagaagccccatctacgttatattggttatggacttcctccattggctgagttgcgaatggtttgaacaggcattccacacaatccaccggggctaaaacctttcctccaaacacagcaggagcaaaaaaaagcagtacaagtactgcccaaattattatcccccaccacaagggaatttttctattttttttacaattcatttataataaaaatctgacattggctcctcatgcatccccaagaaaattcctgcaaattaacgaatgaatttctccacagaattgttaaacccggcatccatcgttctccttcaactctgaaattaaaccaatgaatcggaacgcctttttctagcggatttacaatccgttacggacagtaaaagaaaaaactcttgttctcagggaaagtgccgctctttatacggttattgaaacgtgactccgcttcaacatgcaacgaactctataaaagagggtttgccaaaattctacttcaggcccggatatcgtagcaatttcccgtattcccgtcaccagggtgggcccaggcaaatttctgtgctacgtaagaggccctgatacgtaaagaaacgatgttgcaagttcttttctcttagagttacagcttgactccggattgtaaatccgcccaccttctcaagaaagcactatttcattgaaaaatgcttcacccagaattattttcatcctgaattcccagttaagcatcttaagaaaagcatcaaaaaatctggccggaatgatatgaaatagccttgcagccggtttatgacctgtccgacaagcaaattgctaccacaaatatttatgattcatcatcccatataaaaatataaataaaaaggaaccggacaaacaggaatggctcggataaataagtagtccgaaacaaaaggaaaccgaaaggctcaccctgtgagcatctcatccggcatccggtaaggaaaacgaaactattttttgaaacaaggaagagtgtttctccgttattattaccgtatggtcacattttacaacatcactctctctaccgccttttccctgctgatgctgtccgtggcggaagcggcacggcccaatgtagttctcatcaatgcggatgaccttggctgggcggaagtaggctgctacggtcagaaaaaaattaaaaccccgaacattgacaagctggcctccgaaggacagcgatgggtttatttctattccggagctccggtttgttccccttcccgcaatgtgctgatgacgggcaagcatacgggcaactgcgacgtacaggatttgaaacgcgtggacgcgggcgaaaactggcgcgacctcaaaggagactggcccatcagaacggaaacctacactctaccggaagccatgaaaaaagccggttacgccacagcggtgttcggtaaatggggtattggggatttcggttccaccggagcgccggacaaacacggcgtggacaggttctatggctacacggaccagaaagcctgccacacctactatcctccatacctctggaatgacggaaagaaggaagttctcaacacttctctgacagccgccactatcggacacggttcccagcccaaaggggaagttctggcggacacctaccgcgcggaacaacacagttccgatcttattgcggataaaatgctggaatttgtgaaggaaaaggcccatggcaaacaaccgtttttcctgtattacgccccgctggaaccccatgtggccatgcagcctcttcaggaatggattgaccgctatccccgcgaatgggataaatccccctaccgcggcaaccggggctatctgccccatccccgcccccgggccgcctatgcaggcatgatttcccagatggaccacaacgtaggacgcctgctggacacgctgaaagcctgtggcctggacaaaaataccatcgtcatttttaccagcgacaacggcaccacgcatgatgcagggggggtagaccaccggttcttcaactccgtagccgatctcaaaggtttgaaagggcagctttatgaaggcggtatacgtgtccccggcattatccgctggcctgggaaaatagccccgggaaaaaccatcacccagccggccttccatgcggacgtgatgcctacactgtgcgctctgacaggagcggatgcaggttctccgctgggaacggacctctcccctgtccttctgggcaaaaaatccgctctgcatgacaggaagcccctggtctgggcagggggaggctacggcggccaggtagccgtgcgtttcgactccaagaaagtcatccgccgcaacctgtttcccggtaaaaaaccggacaactgggaagtgtacgatatcgtgaaagaccccgcagagaaaaataatatcgccgcagaaaaccgtgaccttatcaacagagccatcgccattctggacagggaatatcaacccgcgcccggcttccaggccctgcgttacaaggccccggaacaggtagccgaataagagaacgggaaagaaggttccacgatccgcctccttcgccattctgaccttgacgtgaacggagccggggttagtctttcacgcatgagtttgacatcatccctcctttccagggtgctcggaggcggttcctgctccagagaagaattgatagccctcagccgggaaccgctggaagaattgtgccaggcggccaacgccatccgggaacatttttgcgggaatgtcttcgacctctgcaccatcatcaacggccgcagcggcaaatgttcggaaaactgcaagtactgcgcccagtccgcccattactccacggcagtggaggaatatccccttttaagtgatgacgccctcctggcgggggccaggtacaatgacgaacgtggcattctgcgctactccatcgtcacctccggcaagaggctgacggatgaagacgtggaccggctctgcgccagttaccggcacatcgccgaacattgcggcatctccctctgcgcctcccacggccttatttccaagaaacactgcgagcaattgaaagccgcaggcgtttcacgctaccacaataatctggaaacttcccgccgcaatttccctaatgtctgcaccacccatacgtacgacgacaaactgcaaaccatcaaatgggctctggaagccgggctggaagtttgcagtggcggcattatggggcttggagagactatggaagaccggatagacatgtacatggacatcgcggcgctgggcatcaaatccatgcccgtcaactttctgacccccatccccggaacgccgtacgcggacatgccccccctgggagaggaagaacagctgcgcatcgtggccctggtgcggttcatcatgccggacggcttcgtccgcatcgccgccggaaggaacaccatgaaggaccacggcaggaaaatcttcatgtccggagcgaatgccgccatctccggagatatgctcaccaccgccggcgtcaccatccgggaagacctggccatgctggcggaactgggatatgaagtccgcatgaaataaggttcgttccattttcgcgccctttgccatgaatcactccgactggtcaaaaaaagatctggaatacatctggcatccctgttcccagatgaaggattacgaaacgctgcctcctatcgtggtcgaccacggaaaaggcgtcaacctgtatgatgtggacgggaaacgctatctggacgtggtcagctcctggtggtgcaacctgctgggccattcccaccccaaaatcaaccgtgccatcaaggaacagcttgattccctggagcacgtcatcttcgccaacttctcacacagaccggctatcaccctgtgtgaagaactaatgaagaaaattccgcgggggctctgcaaattcaatttctcggataacggttcggcatccatcgaatccgcgatgaaaatgagttttcaataccactaccagaccggaaaccgccagaaagtacgtttcatgtccctgagcgacgcctaccacggagaaaccctgggagccctctccgcaggaggcctggacctttattcggaactctacaagcctcttctgctggacatcgtgcgcattcccgctccggattgctaccgctgccccaaggggaacaaacgcggctgctgccaggcggaatgcattgacgcggcacaggaggccttcgcgcgccatggggacgaatgcgccgccctgctggtggaacccctgctccaaggctccgcaggcatgcggatgtatcctcccgcttatctggcgaaactgcgttccctgtgcgacgcctacaacgtgcacctcattgcggatgaaatcgccaccggttttggccgcacggggagcatgttcgcctgcgaccaggccggcgtttccccagacatcatgtgcgtctccaaagggctcacgggcggctatatgcccatgtccatcaccatcaccacgcagaaaatttacgatgccttttatgcggactacagggaaggaaaagcattcatgcacagccatacctattccggcaatccgctggggtgctccgccgctctcgccgtgctgaaggtcctggacgaggaacaaatcattccccgggcgcaggaaaaggcccctcttttccgccggatgatcgtggaggccctggggaatcatccccacgtgggggaaatacgcagcctgggactggtgaacgccattgaactggtggagaacagggaaaccaaaaaaagctttccgtccgagcagcggctggggtaccggatttacagggaagcccttaaacggggactgctgctccgccccctgggcgacgtcctgtatttcaatccccccctcgtcatttctccagaggaaatggaggaagccgtatccatctgcgcttcctgcatccgcaaagtgctgggataaatgttcatccggcacaacaagacgaactgttctttcttgaagaagattgtgaaccaccaatatagtgcaattataatttgacaaaagccgggatgcggcagctacaatacagccgccgcgccccggttttcttatgaatgcagataccaaaatgttacgcaatagaacggcattttcgggagtaaaggtataaaccttattgtcttatttccccgcccggaaagccgcataaatcaaagcttttttatcccctatcgcgtcacattcgcccgctttttcctcatgtgctcggcgttatgtctgcgggtgatcccgttgtaagcactcttgaattttgaagtatggtatccacaggagctgcaaatacaatatttccgcaatgaagttgacaataaaggagaaatgcttatggaaccagtcaatttgttgaaagctaaaaatcgtgatgagttaaggcaatggcttgaacaaaatcataagactgaaaaagaatgttgggttgttgtaaaacgtggtaaaccaaaagggaataacacattttggtatattgacgcagtagaagaagctatgtgtttcggctggattgatagtacaacaaaaaaactcgataatggtatcactgcacaaaaactggctccccgcagaacaggtagcttatggtctgaactaaataaggaacgctgccgcaggatggaaaaattaggaaaaatgacggaagccggacgttctgctttacccgatatgtcatcagcaggttttatcatagataaagaaatcctaaaagcattacaaactgataacgaagtgtgggaaaattttcttaaatttccacctctttatcagagggtacgcatagatactatacagataaaaaagaaacaaccacaactttttcaaatcagattacaaaagttaattaaaaatacaaaaaaaggaataatgtatggcgaatggaatgataatgggcgattatcagattattagctccggcaaccacgttttaaaacaaaagatgcaacttttcttcgggacaggggtttgtaaggataccttgcaatctaataccgccatgatacgcctcaccccgctccgcaaacgtccggcgctttccgcgctggtgcttcttcttatgggctccggcttctgccaggctcaggaaatgcttaccgattccgcaagaaaggaagcttccgaatggctgaaggaagtcaaagccggctacctgaacaccagctcttcccgcatccagaaggccgtggccgcccttaccgcagccaccagcacagaaaacgccgccatgaaactttacgtggacgccatgaaggaccggtttctgaaccccaccagcatgatgtcccgcatgctgaaccggggaggcgggggaggcttccggatgatacgcatgccgggttccggagggaagggaggcaacagcagcaaacctgacagccccagcaccgccttctccaactggcgcaagcagaacacgggaaacaacgtggcccccggttttaaaaaagcccttcaaatccagtgcaaatggatgctgctttgcctgagaaaagcggatgcggaaaaaaacgagcgtgaactcaacgtttcctccagcgtcctctccatgctggatgaagtggccgccaacgccaaggacgtaggcgaacagcttcccatggtaagcggagccagcgaagtcatccgcacctatctgaacattggggactaccgttcggaaaccctgccggacaacctgatggacctcaataccatctttgaccgcgtgctgctggttccctataaggagaaaaaagatgtggaaaatttccggaagctctggaacaaacgcatcgccctggaagcaactctgcttcaaaacaactccgccagcgataagaaaacggcggaagcggaaaaagccacttttctgaccaaaaggcagtgggatcgggaaaaagcctgctttgaactcggtgaccaggtagcggcccttgaaaaaatgaaaagcctgatttccagcatcaaggagccttctgaaaaacagcgcgccatccgcgacctggaattcctgcttcttaccccggcggaacaggcgaaactccgcgaagagcgcatgaacagacgcatgccgggcggcccgcgcttttaacaatcgtcgccaagccccaacctccctcctttcatcccccgttgcgtaacgcgcatcgggggatgttacattgcggagagtcgcacttccttgacggaggcagcttccttcctgccgggctggaaccatgtcttgcgcaggcggtaaacgcgcacaccctggatattctcatccagatgccaggctgtgcgaacgccgtgctgctcccagatatggcggctgagcatccccatgaacttgctgtccatatcggaaacgtccccttgcggcgtgagacagacaatgtacacattatccctgcacaggttcagggaggactgccccgcccaccccatctccttcagtttccgctgtacgggtttcaacggaaaattccagccgcccagcgtgacaacgttcttccgggaacagctccaggccttgcggaaaacagactgccccggggccagatcgtcaatagtgccgccggacatctggacgcaaaacagggaatcgggctcccggtccacccgctcgcataacaggcgcccggcatccggggaaaaagactccagattagcctcccacacggcggcgcacgcctgggacaaagaaacggagaacgcgcagaacatgggcacgccgcccgcaagagctcccttccccgtccagttgatgcggatgggacgatatttatccgaccacagcagacacagccctgcaatcaggaacgttggataaactacgcggaaatacaggcggtctatgctggacatatacagcagaatcagcaccagcagggagcctacgcagtacaccagggccggagaatccccgcgccggaaagaaacgcggcatgccagaccgaacaaaatccagcaagggagaagatccattacggaatcccatgaaaacagatgcaaggctttctctccacgggcccacgccctgggccagaattcacctccgtcccgcgccaacagaagcctttccagataatccgtgttgaatacatccatatcgcaattggtaaacatccggaccatcctgatatcgttggcgaacacgccgtacttttcacactggtaggcgctctcctgcctgatgggacacgtgtccgagagaagggcgcgggcctggttccatgccgccacgtcacatccctccagcacattccggtgggcgtatttattatattcattcagactgaaggacgaaatgagcacacaggccagagccagccagagacgactgagggcaaacagcttttccctggacggcctgagcccttccaggctgcctgccaacaggatggccccccagaaagcgtcgcacaccagggcggcatccagccggaccatgctgcccagcacgcacaggaatactcccgcgcaccaccccctccaggaagagccgtacttcaaacacgccagcacacctgtaaatcctgtcagaaaggcggcatggctgaattgcagagcggcgtaaaagcccggcatgatcagaagccacaccagcagcagaaccagcgtattgaaatcatatctgcgcgccttgcgggcatgcgccgtcagcatcgtgaaaatggccgctccgctggacaacgtggcaagcgccagaaacacaggccagacggacaccccgccaaggacaggcgcaactttcaacagaagaccggtcaacaggggattgacgaaaatgacatgggcgtccgcataagagggatccccccatccgtcaagcacggacgcaatcaccagatcgtcattggactggtacgccacgcccacaaggctccaggccagaaccagaagcaacaggttgaaccatacgggatggagcagaggaaaaagcgatacccatctccaaatctgtttcaacataagcaaattccctgacgttacagactgttttccctgtccggggacgcatactaggaacggggaaaatgaaagtcaagagccgatccggatgaacaaaccggaggggctaaaaggctgcaaactcttccttaacggttcaggcagacgataatacccgcgataatcatcgcgttgccgcccactttgcgcatggtgattggttttccaaaaaaaatccggtcaaacaaaaggatatacacatatgcggagcattccagcatgttcaccgtaatcatcggcaggtgggacaggcagtaaaacgtcagcaggcagcagcccaaaaaaacggaatatgccgccatcgtggccggattcacgaaataggcaaggccggtcagccggtcattcatggcagactttttcaaaaccacctgtgtgcaggaggccagaaaaacggaaaacaggttcagcccaatataaaattcttcactcatgcgcctcctccgtggaaaccaaaataatccccccgatgaccagagccgctcccgccgccagcgtccaggaaagagcctcccccaggcaaagccatgccagcaggataccccagatgacaacggcggcacggttggcataagccacacccagattgaattttttcagcatgacctgccatcccgccgcataaattcccaataggaacagcacgccggccagcagggcgaaccggcgccagtccgtccagccgtagggggcagccatgcgccccagcacggtattcagcgcgtaaacgataaacagcaggtgcagaatcaggtagttgatcatgaaagaaataaagagccgggaacaattcactcataccggcgcgccaccaccacggcgggcctgtgcttggtttccttgtaaatcttggaaatgtaaatgccgataacgcccaggctcatcagaatcaagcctccgaccagccagatggaggccacggaagaggcccagccgggaggggctacattatacaggagctggcgcacaaccacccaggcgacatacagcatggctaccagggtgaccgccaggccaaagtaggaaatatacaccagcggcctggcgctgtaggaaaccacggaattcaccgccagcgccatttttttgcggaaagtgtaggtagttggagaagaggatgctttcttcaccctgcacggcacctgccggaaaccggcggaaacgcacagcccaaagaaaaaaggctcccggtcctggaatttcagcatctcccgcaggaaacgcgcgctcatcagccgcgccgtaaccatattcctggtaatctgctggtcggaaagcaaattaaacaatgtgtagaacaattctccggaaacggcttcaaacaagccgcccttcctcttctcctgcaccccgtacaccacatccgccccggtagaatccatctcacgggaaaaatcaaccagccactcgggagattcctccaaatcactgtcaatcaagaatacgcgctctccccgggcttcttcgcaggccacgtacatggccagatgatgaccgaagttgcgggataaatccaccacgcgcacccggtcgtccttttcccgttccttcaacgcctgttccagaccgtcccttgggcagccgtcattcaccagcaccacctccgtgcgggaggggtcataacccgcctcaagcgcggcggcgaaactgcgggaacagaactccgccagataaccgcccgtacaatacacggtagccacaatggacaattgaacctgtggatcagtcataacgcttttacatacatgagaacgcgtttcctttccccgcttttcacgcacacctcgtccttttccggaacacggacaaaacccatgcgctcatgaaaacgcacggaagccgcattgtcctccagaatccgggcatatagccgttccaggcccagctcccctgcggccagctccatcatcccggcatatgcggcggaagccgggcgcagttccctgaatgccctgtcgtaaagataaatgcctatctctccgcaacgcgtattccggtcaaaccagggcaggtaaaccagacccagcggaacctggtccgcataaatcacgcaggcgcgggcatcctccccgcggacgttcctttccagccacgcccggtgctgctcctcagttacctggtccaacaaaaaaaacgggctgaccttttcggaattgcgccacacgcgcaggcggctgcgcatggcctcatccacatcagacacgttaaccaggcaaattttcatcatgattcaactccctccagcccgaagccggcccgcaacacctcccggcagccttcttcccccaaatcgtaatacaaaggaagcctcagcaacgtatcgctggtacggttcgtatgaggcatggccccggcagaacgcccgaatctcatcccggcaggggaggaatggaggggaatgtagtggaacaccgctttaatcccgtgctccgccagcttgttgatcaagcgcgtgcgctcctccatggaacggagcagcacgtaatacatgtgggcgttatgcgtgcaatgctccggaacgcacggacgccgcagcaccccctgttcttccaatggagccagagcgcggtggtacatattccaccacttcaacctttccccgttgatttcctgcccgtgttccagctgggcatacaaataagcggcggtcatctctccgggcagataggaggaacctacgtccacccaggtgtatttatccacctgcccgcggaaaaacctggcacggttggtccctttttcccggataatctccgcgcgttccatcagggaggggtcattcaccagcagggctcctccctctccggaaatgacattcttggtctcgtggaaactgtaacagcccaaatggccgatagagccgagccgacgccctctgtagcaggaaccgacgccctgggcggcgtcttcaatcacatacaggcggtgcctctcggcaatttccatgattgcatccatttcacaagccacacccgcgtaatgaaccacgcaaatggcgcgggtgcggtccgtgatggccgcttctatcagcgtctcgtcaatattctgcgtatccggcctgatatccacgaatacgggaacgccgccgcgcagcacaaacgcgttcgccgtggagacgaacgtataggaaggcatgataatctcgtcgcccgggcggcagtcgatcaacagggccgccatctccagtgcggctgttccggaatgaaccagcagaacctttccggcgccggtgcgttccgcaagcagttcatggcattttttcgtgtaatagccgtctccgcataaatgggcgcgctggatggcgtcccggatataatccaattcgggaccgtgctggtgaggttggttgaaaggaatctccatggcttcagaaaagaccggcccataacggacgcccggcgcaggcatgccgatcccgtgcgggaggcgttccccgcctcccgcacggggagaccctactatgaacggagggctgaaaacaagcctagaccttgataaaggtccggtttttgtacatgtaatacatcacgccccaaatcagggcgtaattgcagagataaaagacaaacctgtccgcatccccgaaacacccgctaaacccggtaaacaatacccgggagaaattgctcgtaggggggcacagagatacccatatgtacacgaaaatggcattgctccctattacggagaaaaagaatgtcagccagttcaatttcagcacatccgtcagcaggtagaacagggccagcagcaaatagcaccatcccgccgcccacaacaccatggaactggtgaacaaacgcttgattatcgggaaatccaggctccagacataccccagcgccaggcagcccgcgcccgaacataacagccacgccagctttttcccatgcccctgcacccgcttcagaatctggccgcccagcagaccgagcatggtcatggcgccaaaaccgaactgcgccagaatccatgcataattcgttccatcctgccagttccccatcaggtatttatccagcagcagggccagattcctccccggttcaagcattcctgccgcacaggaacccaccgctgggtcagaaaaggaaacaaactttatgaccagccagtacacagccagcagcccccccgttgccgctacctgccaccggacggacagatgaagaaggcaaatggccgcaatcaggtagccggaggcgatggcctggagcgtattgcagtacagggacattttggacggttcaaaactcagcagatttccctgcaccaccatgcccagcaaaaaaagcaccactacccgcctggcaactttcaggtaaatcttccacaggggttccgaaccgatgcgcctggaaaaggaaaacggcatggccgttcccacaataaataaaaagaggggcatcaccagatcccaggcggcgaatccctcccaagccacgtgcgtgctgtgcttcaccagccactcggggctccggtcgtaaaaaagattgatgccggccacaaccagagccaggcccccggtcaggaaaaacatgtcaaatccccgcagggcgtcaatggccgcaatcctctgcggcctcgtatcggaaagtgaactcatggcaatatcccaactacggcattatgtacgccaatctttccaaagactttctttttctcaggctccgtaaataaacggctgtttccggaaaaacccatcctctgcggcaactccgtcatgatgcctttcttcatattccctgccccgcatttcatgctatgctttccccgcaacatgaccatggggaacgaccaatccggcgaacgcgacagcttccggaatattgaaacttatgcccgcctgaaaatggatgaacttggtctggcagactggcaattcggctgggaccgggccaaaagaaggctgggcgtatgccgcctgctggaaaaaagcattacgatttccatccacttcgtccgcgccaacctggagacccctcatgaaatccgtgacacgattctgcatgagatcgcccacgccctggcatggacccgccacggagaacgcacccacggaccgcgatggaaacaaatttgcagggaaataggggctgtcccgtgtgcctccgccaaaccggacgccatccgcgtcaccacgtacaaatatctcctgcgtctgaaaacgacgggagaaatcgtcggcaaataccaccgccgcccctctttcgccaaatacctcaagcgcatggccctgaaaggccgccccgatacgctgggccagctggagctggcgccttatgaagaataacgtccacaaaagctgaaagaaacgagccgtttccggtattctccagcatcaacgatcatcccattccgggcatttccattttttacgtctgctcattatccggaacagcagaggaaacactcaaggtgcgctggcgtacgtaatcatacaccttcgggtcgctgtctccggctgcccagactacccgcaggaagtcggcgggatgaatgtttccatggtcccggaagaaacggcggtcattctcacagcagtaaatgatgtcatcccccatggaaccgacgagcttggcccgcgccttggcaatcaggcgcggaaggtaggggagaccgcagagttcgtcgccgaaccccggcaaatcatacccgatcacaggtttcccctggtaaaactgcccgtgctggacagtcaggaagaagtcccggcgcgccgccgccatcagtagaaccgtggtgggggaaggttctcccgtgcgggcataggtttctacaaaatcaaacaattcccgcgtgcggcagccgatggaagacagaaagataatttcctgatccgtaaagaagccgtccacattcctgtggccttcatggtagcgccccaccgcttcgcggaaaaggtcgtaaaatgtatcgttccaatcttcctccatcatcggcccggcgatttgtgtttgcgcttgaagttaagcatcatgatctgcttggtcagattggcttcaaaacgggcctgttcctcgcgggacatttccgaacgcgtcttgagcacctcctgcgcttcctgaatggcccgctccacgctgccttcatcaatctgggaggaattaagcgcgaggtcggttaccatgaggacctggtttccattgacctgcacaaagccggtgcctaccaccatgctttcctccgggccgtccatgggcttgtagcggagctcccccggttccagggaggtaatcagggccgtatgatgttccagcacgcccatctccccgaggctgccgggcagataaacgtactctacagtagcggtaaccgccacttcatccggggtaatgactttgaactccatgctcatggttcggaacggcgggaaaagggttatttggcttccttgagaacgtcatcaatgccgccgcgcatgaagaaggcgtcctccggaaccatgtccagcttgccttccaggatttccttgaacccccggacggtttccgccacgggcacataggcgccgggaatgctggaaaagacttccgccacatggaacggctgggtcaggaagcgctgaatcttgcgagcgcggctcacgatgagcttgtcttcttccgaaagttcgtccatgcccagaatggcaatcatatcctgaaggtccttgtagcgctgcagcaccatctgcacgccacgagccacttcataatgctcattccccacaatttccggggccagggccttggatgtggaagacagcggctccaccgccgggaagagcccctgggccgccagagagcgttccagcaccaccgtggagtccaggtgggcgaaggttgtggccggggccgggtccgtcaagtcgtccgcaggaacatacacggcctgcatggatgtgatggaaccgtgcttggtggaagtgatgcgttcctgaagatccgccatttcctctgccaggttcggctggtaacccacagcggacggcgtacggcccagcagggcggaaacttccgaccccgcctgggagaaacggaaaatattgtcaatgaaaagcaacacgtccttatgctcctcgtcacggaagtattccgccatcgtcagggcggacaaggccacgcgcagacgggcgccgggaggttcattcatctgtccgtacaccagcgccaccttggattcttccggtttttccaggttgatgaccccggactctatcatttcattgtacaggtcgttcccttcacgggtgcgttcccccaccccggcaaagacggagaggccgctgcgcgccttggcaatgttgttaatcaactccatgatgagcacggttttgcctacccccgcacccccaaaggcgccgattttgccgcctttcaggaaggggcagataaggtcaatgaccttgatgcccgtttccagcacttccgtgctggtggattgttcgtccagcggcggagcgccgcggtggatgctcttcatgccggcgcaggagagttcgccgcgctcgtccacagcttcccccagcacattgaaaatacgtcccagcacgcactgccccacaggcacttcaatagggcgccccgtgtcgcgcaccggcatcccccgccgcagaccgtccgtagaactcatggccacggcgcggacccagccgtctccgatgtgctgctggacttccagaaccagggtcttgcgcctgccgtcaacttcatagtccacttccagcgcattgagcagggcgggaagcgtttctgcctgggagaagtccgcatcgaccacagcgccgatgatctgaacgagaatgcctgtgttattcatcatgggaaaaacttggtgttgaaatggagaagaaagaatgttctgtttgaaaggcgggtaaagaaagcggagccatgttattccatagcgcgcatggccgtggtaatttccagaagttcgttggtaatttgcgtctgacgcgccttgttgtagtccagggtgaggccgccgataatgtttttggcgttttccgtggcccccttcatggcgaccatgcgggcggaatgttcggatgcccgggcctccagcacaatctgaaccagcccgtggaaaacgtaaagaggcaggatggtatccaacagggcggcggggctgggttccagcaggaattgcttatgggcttccgctccgtccagggaagagcccccggccttcgccatgttcatcaggggttccggttcaatgggaagaagctggcgaaagacaggcttctgaaccattgtgttcacaaaaccggagaaagccacgaagacgcgcccatattcctccgccttgaacttttgcacgatgaaatcaaataccggctttagttccagcagagaaaggggatccgtcaggctccaggtggcctccaaccgttcattcaatttggcgagcgccgcattcagcttgcgtccgatggtgatataatgggcgttttccggagcctgttcccggaccattttgatcaggttggcgttcaggccgccgcagaggccgcggtccgtattcaccagcagcaccagatccgcgccgccgtgggtttgcatcagggggctgttgctggtgtcaatttcatcctggagatggtagagcacttccgccagggcgcggatgtaggggcggcccttgacggcctggtcctgggcgcggcgcattttggcggaagccaccatctgcatcgccctggtgatctgggacgtgtttttgacggacttgatccggcgtctgatatctctcagattgcccatgtgtcagtactcccgtaatcgttagttccagctgagcttgaaggattcgatggcggctttaagccctgcgtctatttccggcgtcaggtctttttccttcaggatgctttccagcagatccggatgctgatcctgcatcaccgcttcccacgcgttctggcattccttgatcctgtccaccggaacatcgtcaaagtaccccttttgcatggcatacaagtcagcggcctccagccccagggatttgggctcatactggttctgcttaaagagctccacgatgcgctggccgcgggccagcttggccttcgtgctggggtccagatcagacccgaactgggcgaacgcctgcaattccgtaaattgggccaaatccagcttaatggagccggccagcttcttgataattttcgtctgggcggaagaacccacgcgggagacggaaatgcccacgttgatggctgggcgcaccccctggtaaaacaggtccgtttccaggaatatctggccgtccgtgatggaaatgacgttcgtgggaatgtaggcggaaacgtcgcctgcctgcgtttcaataatgggaagagccgtcagggaaccgccgccgtgttccttgttgatgcgcgcggcgcgttccagcaggcggctgtgcaggtagaatacgtcccccgggtacgcctcgcggccggagggacggcgcagaatcagggaaatctggcggtaggccacggcatgcttggaaaggtcgtcataaacgataagggcgtcttcccccttgtccataaagtattcccccatcgcgcagccggcgtagggcgccaggtacagcatggcggcgggatcggaggcggaagccgccacgacgatggaatatttcatggctcccgtttcctccagtttcgccaccaggcggctgatgttggcgcgcttctggccgatagccacgtaaatattgtagaggggctggtgatccggaagcttgccttcctccgccagacggttctgttccgcctgggcaatcatggtatccatggcaatggcggtcttcccggtggcacggtccccgatgatgagttcgcgctggccgcggccgatgggaatcatggcgtcaatgggaaggatgcccgtctggacgggcacggaaacggactggcgggagatgatgccggaggcgattttttccaccgggtaatacgcttccgcctcaatcggccctttgccgtcaataggttctcccagcgtgttcaccacccggcccagcagggagcggcccacgggcacggaaagaaggcgtccggaacacttgaccgtgtccccttccttcaacctggaatcatcccccagaatcacggcgccaacctcatgttcttccaggttcatcgccagccccatcaccccgccggggaactctatcatttcattgagcatgacgccgctcaatccttcaatcttggcgacgccgtcccccacggaacgaatgacgcccacgttttcctgactgacggaagccgtggctttttttatttctgcttcgagttcttgaagtatgttgctcatgggaaaaattcgttagttaattggaaaggatgcgggccaccgcagccaggcggtcgattctggaacgcacggagccgtccctcacgtcatcccctacctggatgcggacacccgccagcagagacggctccacctcccagcggtagtagagggcgccgccatatctgacctccagtttggcctgaatcagggaacgttcctcttccgtaaggggcacggcgctttgaatagtggctgtacggctcttcaccgcatattccaccatgccggaaaaagccttcagcagagcggcataattgcggggcttgcgttccgcaatcttccgggcgatcagacgcacgcggtcctccgccacggcattcccgtccatacagagccggaacagtctgcgggcggcattttgcgtgtcctttccgatcttcataaacgtttcaggaatccaggctgtcgatcgcttcccggttgattctccgctggtcttcttccgtcagcatttttccggtaacctgggccgcagccagggccaccagctggccaaattgttcttttaacgcttcacgctctttctgctgttccagttccgcaagctgccgggctttttttatgatttcctcagccttccgggaggcttccgcttcctgttcttccaacaggcgggcggcggcagccttggcggcgtctattttctcctgccccttttcccctgcttccaccagcatttcatgcgtctgttccttgacggaagccagctgccgctcgctttcctcacgcatttcctctccttcttcaatccgccggcgtcttttttccagaacgttctggatgggcttgaacgccagataccgcaggatcgccaccatcagaatgaaagcgatcaggttggcaacaaaaggctcccaactcgttaccccgaagggagcaaaaggattccaggcttggtcagctatgagattcagcataagatgagcggtttgaacatgccggaaattttccggaccggcaggggacgggcgcgccgccccggagcggaaaagctccctccgggaacggaacttccgttttatttcacaaaaatggagatcagggccacgccttcaatcagggccgccagcgtgatggcaatcaccataatgggggaggaggctccggggttgcgcccggtggcttccgcggctttcgagccgatgaggccaatgccgaggccggcgccgatggtgacgaggccgaaacctacgttgccggacaattcggccagggaggtcattgcgataggatcgatcatgttattggtatggtttatgttttttgttgaacgttcccccacaggtcgcccatggtccggaacggaaagttggcggtacggtttatgaggcttttccgggaggcgggctgtccggaacgggaagttccttttcctcatttttggaggtatggccgtgggcgtcatcgtcccctacctgaagtttcaggaaaatcgccgtcaggagcaggaaaaccagggcctgaatgaaccccacaagcagttcaatcgccagaaacggcagtacgcacagggcgctgagcacgggcccgaacatgtgagccatagtgtcaataatcgtctccccggcgtaaatattgccgtaaagacgggctgccagcgcaatggggcggatcgtgatgctcaggacgtccaccagccccacaaagatgaagatgaacaccagtacaaatcccatgaaccccggcagccttcccttggggccgaacagatgcataaagaagcctttcagtccctgctcccggatagaccagtaaagccacatcagcgcataaaaaatacccaggaacatcgtcacgttcatgtccgcattcgcgccgcggaacagcggcaccccatggtaagtgacggttcccaccccgggaagaagccccatgtaattgctgaccagaataatggtgaaaatggtcccgaagtaccagaagtacttgcgtgtcaggcgcggccccagaagggacttcacaaagttgtacagagtctcaaaaaagtattccaccgcattctgcaaacgggaaggcaggatgcgcatggaacgggtggcggaccatacgaccacccctatcagaagaaccgccagaaacagcatcagcattgagttggacaccgggagctcaatgcctccgggcagcggaatggaaaacaaatggggagcagcctgttccaatccgtgctccgctcctgcctccgccgcacaggcgctgccgcccataacgccgaacatggtcaacgccgccaaccacaggaactggaaaaatctgctcattgtctttctctcaccattacttgtgccaactcctgtaaatactggaagagggaatccattccctttatttgacggttttgattatgtacttccctctttcttttggcaagcccaaaacttggcgcgtacgcaaattgtatacatttgtacataattttaaagcctacctggatgaccgttgcgtcatgaacacaaccttttctccatcaacaaaaaaggcttccggaataaactcccggaagcctgcaggaaaaactgggcggaggaaggccgttacttggcggcgggaataatatggatgtggtacacatccctgccgtccgcggccttgcgccccgtggcatgcactcccgtaacatcggaagtgattacatccagggtttccacagtcttccggagcttcttgctgtcctccgccgcgctcttcagggcgtcacggaccggaaccaggttaagctgaaattcgagaggggctccctgcgccggagatttcacggattccctgaggacttccaggccgaaagccttcggcatgctgattgcccagcgggtgtcggaaacgcttactaccgggttcagatcggcgcccagagggcattggtaatcgtaggtagtgatattcccgtccacagaagactggggagcgggaagctccgccattttaccctggctgagcagggtgacgacggttttggcggcatgagtcactttctgccaggcctcgcccagagcggcgcggttgttcacttcatacgcagcggagaagcgcggcgccggcacattcttgagcatgggattgggagcgccctgcatgtccatcatgaatacgcctgaacccgtaaggccggaaagagcagtcttataagccttccagagctcttcaatggtaggcctggccatctggatcataggggcggcaatgcgcacctgatcgctcacatcatgcttcgggttggaaatataggcattgccgtagtcccatacaatctgggcaaggttactgcacagggaacaacccatatccatcatctgcggattgaccgtgcaggaggaatacagcaccgtggacgcgccaggacgcacggcactcatggcggaaggagcgtccaacttgtagaattccagcggatatgtgcatgcttccacatgcaccccctgatcctgccatgaatagtaggaaacggacgtggccttccgggccagctcttcatacatgccaagcatgctgcccctgatggaatccagagccgtcatggaaggagccggatcggcaatcttccaatcggcgcctattgcctgcatcacgtccttcaacccggtgaacatgcccttgtaataggccagatccatgttaataacccctttgacggaggctttgtctgcgaagagcagaccgtaggccggatactgggaccgggcatcggccatggaaaaatcaggacgagacagcacggagtcctggggggaagaggctatgcggacctgtttttcaggattggtggttataaagcctaccagggtatcctccacaaaagagacggctacatacagcctggattcatccagacgaacgagcgccgccttgaggcggtccatattttcctgggaaatgtccatctgcccctttgcctcctccagaagctcttccagcttcgcgcgcacctttttgcagtccacttccgccaccttgcaggccaggccattgtaggtcttttcgtacagggaaaccattccatgcagctccatatcctcctgaagattggcgtccttcaggaaagctttggcctgggccagggcttccggcgtcagtttggcggcaatcatcacgggcgccgtcgcagcctgggaagggcgtaaatccatcagctcagcccactgcgcaatcatctcgaccccctggccgcccatggcctccgcttccgcgccatcgtcatccccgcttccattctttactccctggaaaagcctgtaaacggataaaatttccttcatctggttcaggcccatcctggtaaaagaggactgcgcgctatccagccacggagcccattcggggcccaagccgatcatcgcgtcaatgacaggactgctgaaagaacatttccgctgcacgggttcgggagcgtcttctcccggaatggctatggattcatcggccacctccccggatgaacaggaactccaggttttaaccatgttcaaattctgaacgctcttcatgatgccggggatatcgtaaacccccgctaccacccccatatccttgggaaagagggcggctattccgaggcgttcggcacgctttgccaccagatcggaagcaacggaagtcaaaggatcaggcgaagcggcggaagtcaggccggccgtatcctggccggccttggcggaagatgatttatcatcgtcagagcaggcggcaagagcgcaggtcagcgccaaacagggtatggagtagaaataatgctttttcattatctttaaacgtggggtcatgatgtcatctgacaggaacgccgctccttgcggcaacagtctcatcagcgcaccgtcttcattatacaggcgttttcccgcgagacgcaagcacaatgcaaagcattaacgccactcagggcgcgcagggcgttgacgcatggagaacctttccgcgccgcccctttccgcatcttcccgggattttccgggaaccgcaaaaacgctccggatttccctgaaaaacggattaaaggggttccgccatgggaatatcatcctccggcaggggagactgcggcgcgggagcgtttacgggagtggagcggttgagatggcggggaatctgctggggcaacccgggaatgtaatcggagtctccccggcgcggcgtgaggggggccgcagaaggctcctccgacaacgggggcgccgacggcccggcatgccctgaggagccgcccaccggggttgccttgatttccgcatcggaagagtcatccagatcggcagggatttcatcagccttgatcggctccatcccttccggatcatacaacccggggggcaggttgtccggcacgacggcaggggccccgctccgttcccgaagagcggccgcggccgtttccggggtttcctccaccggttccgccaccggaatgtcgtccttgggcgggtcaataatagccttgatgtcttttttctccgtttcgaaaaactccttgacaatgggagcggcggcggctcccccgcccagccgttcgtgggcgcggccttcatacagcaccacataggcaaagcgcggattgtcgcagggcatgaaaccggcaaaccacgccagacgcttgtcttcccgttccggcccccattgggccgttcctgatttgccggcgatactggaataggacaggcgcgcacgcccccccgtaccggcttcaaccacttccctcatccccttgcgcacgctggacagagcacgctcataggcaggcagcgggcgctgaacttcctggggcttgggcgcgtaaacgacattggcgttgccgtcctgaatttgcttgatgagctggagtctgggcagatacccgtttgccacgccggacatcatgtgcgccacctggaggggcgtaaccagcagcgtcccctggccgatggacaaattggcggcatccccggacatgaaatcgcgcttgtaattgcgaatcatataatcactggtcggcaccaggccgggatcgtccggaatgggcaggccggtccgttcccccaggccgaaagcacgggccgtatccatcagggcttccgcacccagcttcaggcccatctggtacatgaacggattgttggacatcgccagggcgcggacacagttgatatcccccaggggagtcttgctccagtttttgaaaacgtggttgccgatcgtcacggaagccgggcagtaaacgagcgtattttccgtgattttgttgttcctcaaggcactggctaccgtcaggactttaaatgtggaagcgggaggataacggccctggaaagcacgggcgcccagaggaccggcaggatcgttgcgcagggcgtcgtaatccttctgggatatgtttggaatgaacatgttcgggtcataggacggcgtggacgccatcaccagaacttcacccgtcacgcaatccagcaccaccatggcgccgcgcctcttgccgcgggaaaggatgcgttccgcatccttctgccatttcaggttgagggtggtgacgacagctccgccgggcttggggcgtatttgcagttcatccagaattttattgccgtcttcatcaaacatcaaacgccatacgccgggcgttccggtcagatttttattgaattccttttccagccccgcacggccttccacctgctcccacagcgggtccatgtggttgatggggccggttggcagttttcccttggatcccacatagccgatgatatggccggcgatttccttctccggataggaacggatgtaaatgggcaacagctgaaggccgcgcacgcttttcactttatccttcagcttttccgcttcctccgcacgaatgacgttcgtgagcggaagaggcagccagcggcggtgctcataatgtttccagagctgttcgtcggaaaaagaccacgcctttccggcaatttttttggcctgttccaagcagttgcgcccgaattccactacgcgggaacggtcggggttttcaaaaatttcaaaccgcaaagccagctgataggctacggacgtcacggccagcggttccccgttgcggtccaggatggggccgcgcggcgcgggaatcagcaaagccatggtcctggcggaagggcgcgtgctggtgtgcgcttcccgcgcggcgtccagccgtcccccgccgagggaaggaatcagggacagggaatccaagccattctgttccttttccgtttccccgggcatctccggagcggcggccacgccttcccgttctccggaggccgtatcggaatcctttttcctgtctcccaggtcaaccgtttccacagcgtcatcctctccgcgctgctccaccgcagcccggccagcagccgctcccccccgagaagacgaacggcgcgtggaagcctggccccaggccgtatccgccgtccacgcggccaacccggccaacaataccagggaacgtatcagaacctttattttcatcagtttgcaggagtgtggcaaatataccgcaaggaatcaacgattattcgcgctcacgcttattcctgaacgatgacggctgttcccaggccgcatttgtcaaacaggatgcggcatgcctctaccggaacccggatgcacccatgggagttggcatcccggtacacggtgcccacatgcagccctatcccgccatgaatgcgcatccacagcggcattttggcgccgatgaatttaccgccgggcggcacgcgggaagaagaggtagcgtccgaattcacgcacaggccgcttgcgtcaaacacgctgccgtaagaccgggaacggtaatccgcatctttttggatgatggaaaacttgccgcgcggcgtttcatgggcggatttgcccgtgcaaacgggaaagttcatggccggcttgccgtcaacccacaacacgccccgctgatcattcagatgaatgacgattctgctgttccgcgtccgcgcctgctggatgcgttcgtcatgataccagatatcgcgcgtgaagcggtactgggggtccgcgacaaaagcttcataggaagacgcatacctgccatccttcatcaacggctttccgtgaggcgtcctgggggtagaggagcaagcggacaaaaacagggagacacacagaaaaaaaagaaaagcgggaagggtgtgcggcatgcggcctgctttaccttcttcccccgtggaaatcaagcacgattcccctccgttccttcatgtttggaggaatcctgatagaaactccttttttttccgtatgatgcttttaaatggcctattcctcttcccccccctcccgttctccccgcctgcactccctggacgccctgcgcgggctggacatgctcattatcctgggcctggacgccctggttctgctcctggcttccagaaatccggaaagcgcttttcttcaggaagccgcacgccagatgacgcatgcccgctgggaaggattgcacctgtacgacctggtattccccgttttcgtcttcatttccggcgtttccatgtccttttccctggggaaatacaccagcggaaacgcttcctccgtccccgggcttctccatctctggaaacgggctctcgtcctggcttttctggggctactggtcaatggaacgcttacctggacggaaagcatgcgttatgcctccgttctggggctgattggtttttcctgcgccattgcgggaacctgcatcctgctgtgccgccggacgggagcggttgcctctgcggcggggttcatcctggccctcattaccctgctccagttcacctgcggcaacttcacgccggacggctccgtcaactcatgggtggacaggcactggctcgccggtcgtctgcatgggggagtttttgacccggaaggcccgctctgcgtcgtttccgcttccgtcctgtgtctgggaggatggctggcagggaaatttttgaaggaaagccggctctctcccgtgcacctctgcgcagcaatggcaggggcaggccttctccttttctgcgccgccaggatgctggacggcctctaccccatcattaaaagcatgtggacaggcaccttcgtcctggccgccgccggcatctccctgacgctcctttccctgtttcatctggccgtcgatgtgtggaacaaagggaaatgggccctatgggcgtttcccctccgcgttatcggcatcaatgccctggccgcctacctcattaactctcttctcaacattcatgcacttaaccgacgcgtcttcagcggtatagcagattttttcacacctttccaacccgtcttcctggctgtgtccctgctggtgctgcaatggctcgtcttgtacttccttgacaggcgccgcacttccctctccccaaaagcggccaagtaaccgggcggcggaactcccggccagggtggccggtgttctctgaaaaaacgaagttcccctgtgagacggccggccgacgttatttctttccctcaacgccctgaaaagagaaataaagcggaaacatcattttttgctcgtttcagggaaaagctctgccatcttttccgaaagaggcaaagcacgttccttccacaattcccccgggttcccctgccccattttccaaccctgtgatcattccatgaaagcaatcatgttcccggtccttgctttggcggccctgagcgcttggaccggcgccgcccaaccccggacatccgccattcctcccatatcgggcaaaaaggcgtatcggcttccgctcccgccctaccagaccttctgctggttttcagcggatcgcggccgctggcccggagacgggaaccgggttcttccctggttcggacggacatcccccggcaacctgctggacagcagaccgaatcccagcaccgccaaaccgggggaccatgccatgttcgccctgttccacctcaaagacggcaatttcatggccgtgctccccgtcgccgcccctgattccctcgcgtggctgaaacttgaaagggacgggacattccttgtggaagccggttcgctgggaacttcccccgccaaaccgcaggccgtcctggccgtcaccgccacggacaaggatatttaccgcgcctgttccgccgtatggaacaaggccctttccctccctttcatcaagggcagaaccttgccccgggaaaagaaaatttatccggaaccgttcaagtacctcggctggtgcagctgggaacagtataaaaagaacatttcctccaagctgcttgaagaaacggccaaaaaactggaggcatcccccgtccccgtccggtggatgctggtggacgacggattccagacccaggaaaggcttcagctggtcagtttccaaccccggcaggaccgattcccccggggctggcagcccctgatgaaacacaaaagccccaaattgaaatggatgggcctgtggcactgctattacggcctctggaacggcatccaccccaggcaccatctggatgacgagactgcccgcggtctagtccgtaccgccaaagggaaaatcctccccggtgacggccccggaggagccggagcgttttatacccccttcctacaatccgtcaaagacgccggattcgacttcgtgaaaattgatgtgcaggcggaatacctgaagcatgcggacgggctggacaacccggtccgccacaataccaagtgctcggaagccctggaacaggcctgcctgaaaacagggctcagcctggtcaactgcatggcgcagggtaccgtcaacattcagaacacgcgttacagcgcggtcacccggtgcagcattgactacaagctgggagatgaagccatggccaaatcccatatcctccagtcctacgccaataccctctggctgggacagaccgtgtggccggaccatgacatgttccattccacagaccccgcctgcgcccgcctcatggccgtatccaaagccgtctcaggcggccctgtctatctttcagacccggcagacaaacttaatccggaaaacatcatgcctctcgtctggtcggacggtcttctgctgcgcccgctggctcccgccgtgccccttccggattccgtctttccggatgctctgaacgagaaccgcctgtaccgggtaatcgcccctctgcccggtcaaagcgccgccgtggtggtgtacaacctcaaacatccttccccggcgaaaccggtacgggggaaaatttccctggaggattataaaagcgcggcggccctgctgaacggcaatgcggcggaagcgtatgcctctctcccgccggagggcatcgccgcctattccggagagggaggccgcgcgctgactccggcacagccggatctggacgtagagctgacgggattcaaggaccgcctgttcatcatggcccctatagtccaaggctgggccgtcattggcagaagggacaaatttctttatccctgcgccctggattccgctcccgggtacagggaggacagcctccgcttccgcgtgaaggaatccgggccggtcgtcatctggcggggaaaaggcccggtcaaagtaggaaacacccccgtcagaaatctggggaacgggttttatgaattgcaattccccgtctccaaccgccccctggacgttactgtaacaacggaataattccgcacatttcctctcatttttccctgcttcattttccatgaacccgctgtatcccctccttgctttctccctgttgctcccgctctgccggcattccatggcctccgacgcggtcccgactgccattcccgcgccgaaacctgagactcccaggcaggcgatagaacaattcctgggtcttaccgccatctggatgctggaaatggaatggacccacgcctatgccaataaaacgcccaaggcggaggatttccggaaagccatgctggcggcgggccttcagcaatgccccgcggactttcaggaagcatggctgcggcaaacggccaggccgggacgcaattatgcggctcccgtcctgcgcaagtacggcgtcagcctgaaagacctcagggaaaggctccagggcaaactgttcaaaatcaaccctcgggtgcatccacccatccccctttacgacgaaggggaacaaattccacgcatggacccgcgcacatgcggagaccccaaggctatcctggaagccctggccgccctgcgcgcccaggtcatgggcctcaccccggcccagctgtcccaagccagacagtccattgaacgagtcatgctggaattcacgctggcctacatggaaaccgccatctgcatggatactgcgggcatccgggaaagccaggtcagggaactgttcgcccccatcagaacagaaggatgcccggaagacttccggcgcgcctggcagcacgatctgcctttctttctcaaaggccgcttcacggggccggagctgactctctccaccgtctgcaaaaaatacggagccaacgagcaggaactctttctcaaggtgcgacgaaaaatgaaggaatgggatatccagccgcctacgccgcagacgcaggacgccttccgccgggacatgcgggaaatccgggaaaacatgctgggaggcagatagaaaacagcctttccgcatgcagcgccttccgggaaccttcccggatatcaggccaaggtcaccccagcagcccggcatccattccttcgttatattcccaaattccctgctccaccataaacgcgctccagctattgagcagttgttcaaaataggcggcattcacattgaaatggtaaaatgtgtggtccgccacgtccagaagttcaaatcgggaacggttcttcttttttctccacagctccgccagcctttcgctgttgcgccacggcagcagcctgtcccttcctccatgactcgcaaacaggggaggaagccccctctgcacgcgccgcagggggttgacggcatccctctggtccggaggcatcatgccgcccagcttaaaagcggactgcgccgtcaggtcgcacacgcctcggaacagggccacggcggcggggccaggaggaaggggagcctttttgcggaacagagaccagcgggcggggtggtcaggaagggccacatgcagggccatcagccctccggcatcacttcccgccacagtaatgcgagccgggtccagccccagcagtgcggcgttcccatgcacccaggcccaggcttcccggccctcttccagaatgtccatcggctccacttcataatcgccgcgcgtgcggaacatggggataatgcctgcaataccctgctgggcaagatgaagcgcccacggcacaaaatcccccaggctcttgcccacccacatgccgccgtggaaaaagagcacggaaggagcggcggcttccgcccggtggccggggggaaaaaagacgtacgccatcagctcctccccgtctgaaaaccgcctccacacaaagccgggctgttcccgcaacagtttcctgtaccgggcttccgccaaatgatcggcttctgtgaacaattccataagaacggcttcatgatgcaattgtgttgcactccgcgcaagtttgatgtctaaataatcgtgtaatgactttccgttccattttctccctggcctgctgcgccgcagcccttctttctcccgcttccgcagctccccgccccggagacgccaaactgagagacgacctggacgtggcttacaatacatggcgtctgcatctgctgcgcggcaattatgacggctggagagccacaacctccgcctaccgccaggtgaaagtgcgcaatctggccgtttcggaaaaacgcccctttcccgcctccctgttccggcagcccatggctccccccgcgctcgctccgctgatgtacgtaggttccgtcgtaaacggccccacggccgcagccacctactacggcaaggtggatctggggctgggccaggaacccacggattcgaacgccctggtgctgctgttcacccatgaaaacggcaaatggaaatatgaccaggcgcgctttttcaacctcacccgcctgcccgccgtcaaagaacgcctcaaacgcggagacgcctccgtgctgatggagcaggacgggttccagccccttgggaaaattcccgccgtgccgcctgtctgcccgccgcccaaatacatcgcaaaaattctggtggactgccccggacgcaccgtccaggcgaacgtaaacaatatttccctgcatgaatttgacaacacccgcctggcggaagtcatttccggaggactgagggacggaaccaattcactcacactgaacttttccgacagcccaaacggcaaaaaaggcgccgtactcgtggaagtgtacatcatgccggaaatcccgggccacctgcccgccagggctttttcctacttcgtccccccccaggcgcaccccaaaagcggccctgtgctgattaacgtcactccggaattgctgaagaccatggagccgaagaattcttccccgaaggcagccgccggcaaataaaatcgtcattcttcaacgtttccgttgcgggcccggtcataccgccatatgacaactcaacctcaagtcagcagctccgcggtatccggcaactcatggtggatgggtatccttggcgtcatcgagctatttcttggcttcatcgccctggcctctccctggatcgtcggagccagcttcatttgggtaatcggcatcatgctgatggttctggccgtcgtccggctgatccaggtcttcaccgtcccttcctcccgtgggtggaacctggtgacggccatcctgtacggcatcgccggctggtttctgttccgggaccccaatatttccctggctatcaccacgctcatcatcgggtggggcctggttattgccgccgtatttcagggggccatctggcttcaaacccgttccctgcccgccagcgggtggcggctgttcaacgtgatcatcacgctgatcctgggcctcatggtcatcttcggctggcctgaatccacggcctggttcgtaggtactctgattgcagtggaactgatcttctccgggtggacgctgctcctttatgcattcagcggcaattccgcccgccgttaatcccaatgacgacaatgaccctcacccaggaagaaaccgaacggtacgccaggcatctttcccttccggaactgggagaacagggccaatacaaactcaaacgggcgcatgtcgccctgacgggcctcggggggcttggctccccggcggccctttatcttgctgccgcaggcgtggggcgcctgaccctgattgacccggacgaggtgtgtctttccaacctccagcggcaaatcctgcacgccacggatgcggcgggcacggctaaaaccgccagcgccgccagacgcctgtacgccctgaacccctccgtacgcatcaacacggtccacaggcgccttacgccggaaaatgccgtttccctgctggaagggtgcgacctggtcctggacgcttcagacaattacgcggcacgcttcgccatggcggatgccgcctgcaccctgcgcattccgctggtgtacggcgccgtgaagggctttatcgggcaggtggccgttttcgccccccatcagggaaccgcctgttaccgctgcctcttcccggcagatacgcccatgcaggaaaaagacaccgcctccgccgcaggcattctgggtgcgcatgcgggcatcatcggttgcatccaggccatggaagccctgaaatatcttgcgggcattccctctccgctggtgggcgccatgctctctgcggacacgcggcgcatgcgcttcaccaccatccctctggcgcctaatcccgcgtgcagatgccggactaacgcggggtgcggagccgcaatgaaaaattgacggcgtcggcggcatctggcatcatttccaacaggtatgaatcatttaacacgcgccaaatccgtttttgaaatggagattgaagagctgcgcggcgtcctgtcccggctggacgacaatttcaacaaggctgtggacctcatgtcccaggctctggaccgcggcaacaagatcgtcattgtaggcgtaggcaaatccggcaacatcggggccaaaatcgtcgctaccctgaactccacgggaacgcccaccgttttgctggattccctgaacgccctgcacggggatctgggcatcgtccaggacggggatgtctgcattgccatgtctttctccggagaaacctcggagctgctggccctgctcccctttatcaaacgttttgaactgcccatcatttccatgacgggcaacacggcctcctccctggccaaatactcggacatcgtgctggacacgggcgtttcccgggaagcctgcccgctgaacctggcccccacttccagcaccacggccatgctcgtcatgggagacgccctcgccatggctctggtggaagcgcgccacttcaccgcgcgggacttcgccaaacgccaccccggcggctcgctgggacgtgccctgctcacccgggtgagcgacatcatgcgccgcggggaagaaatggccatgcttccggaaaccgcctccgtgaacgactgcctgaaagcgatgaccacggcccacgccggcgcctgcgtcctgctgacggcggaccgcaaactggccggcatcttcacccacggagactttgtccgggcatacggggccaatcccctcattggagaacagcccgtcagcggattcatgacccgcaatcccatttacgtcatggaagaagacctggccgctgaagcggcgaaggccgtgagcaaccgccgcattgacgacctggtggtgctcaatgcggaaatgactcccgtgggcatcattgacctccaggaccttgccaggctgaaactggtttaagccctccctttcccattcctttcaggcatccgtgattcaaaagtaacaaatcaatcacggatgcctttttcattgaacggaagcttccgtttccacaatcttatttccataaacatgttcctgaaatttaccatcgccctgcttgcctgcacctggggcttttcctgcgcacaggacatctccggcccggaggaagataccaatgtccccgctgtggaggaagccccgcgggaagtccctcttccggacgggaaaacggttcccaaattcgaacccctggatgagcaccgcatcaaaataggccatgtgattgtcaaccacaaggagcgcaccgtcagttttcaggcccaggtcaacatgaaggaaggaattctggaatacgtctgctgcatgcccaacggcaagctgcatgaatccctgctggtgacggaagcggatcccctgcatatcagcctgggaatgacgctgctcaaattccgccgctttgaaaaatttttcccggtgagggatgaaaattttgaatggctgcccttcacggaacccaagccggaggactacgcagacgcctacgtgcagattgtcatgacctatacggaaaacggcagggaacagaaaagcgatttttccgacatcgtcgtaaactcacaaacgcggaagggcctgaatcccagcgactggctttacaccaactccttcttttacgaaggcgcctaccaggccagcctgagcggggaagtaatctccattttcgcgagccgtacctcccccatcaactacatcggagacttccatgacggcgtcaacgacacgggctggatcgtcaacccgaagaaaaacctgtctctgggcacgaacgttaccatcaccatttcccagaaaccggttcaacccaggcaataacaccttatgttcaaatccgtactttcactaacgctggccgccgcgctgggcacagcctccttcggacagaccaccctgacggccgttcccggagaagcggcagccgccaaatacgcctccattagccaggaaattctgcgtgccattgaaaaagggaacgaatacctgaaaagcaaacaaaatccggaaggttactgggcccagccgtcctacccggccctgacggccctggcggtcaccgcctacatgcgggaccccgccaaccagggcaagcccctgccggaatacattcggaaggggtatgacttcatcctgaaatcccagaaggaggacggctccatcttcaaccgcggcatgtcctcctacaatactgccgtgtgcatgatggccctgctggccgccaacaaggaggaatatgcccccgccattctcaagggccgcgcctacctcatcaagcagcagaaccactttgccccggacaacccttataacggaggcatcggctatggcgacaagcaggctcctcccattgcagacctttccaacacctccctggcgctggaagccatttactactcccagaaactcgccaaagacggcaagtacggtgaacagccggatctggactggaacgccgccacggaattcatcaaccgttgccagcaaaaccctgccgtaaacaaggaaccctgggtttccaatgacaaatcccagctcggcggcttcgtgtaccgtcccggcgtctccagcgccagggacaaaaaagccgccgcctttgacaaagcggagcctcccaaagcttacggcagcatgacgtatgcgggcatgcagtcccttatttacgccaatgtggataaaaacgatccccgcgtcaagctggccctcaagtggctggaaaacagctacagcctggacgaaaaccccggcatgggcgtccaggggctttactactactatcaggctatgtccaaggcgctcagcgccatgggaatagataccctgacgctggaaaacggccgcaaggtggactggcgggatgaactggccaacaagctcatttccatccagaagagcgacggttcctgggtgaacactaacaaccgctggtgggaggcggatcccgtcctggtgacctcctactgcgtgctggcgctggaacagctctaccactccattccccgataacggactgccatgctgatttcccgggccggaaggggaggcaatgacctccttttccggccttttccgtacccggaaatgaacgccccatgaaatagaagggtcttttcttcaatacttcaaattcatggacaccattgattccattaccatgattgcagcggcatggggcctgctggttctccggctgacgctggcttttatcctgtggccgcacgggacccagaaagtgctgggctggtttgggggcgcgggctgggaggacacctaccgggccttcacggaaaaaatgggcattccccccttcctggccaaggtggccatgctgacggaatttttcgcccctatctgtctggcgctgggcgtattcaccagaatagcggctctcagcgttatcatcctcatggccgtagccatgaccaaacacgtcaaaaacggctacttctccaactggtccggcaaaaaaaccggggaaggcgtggaattccacctgctttatgccggctccgccctggcgctgctgctgaccggtcccggcccatggtccgtggacgcctggtgcatggacatcgtgcacgtcatcttcggctgacggaggcagacagcacacggaagggcatagaacatactttccggttctcaaacccgccgtattctggtatttatggaaaggctttcttttgcctcgttaaccctttccgccatgaccagccataaacgcttaaaactccggcagtgcaccaactgcgaatgcgtcattaacggagtatgggaatgggtggaggaatgcgcccgcggcgcagcggcggaagaacccgccatgcgcggtattctggatgacgtctgcctgtcccgcaattccctggccacttccatctcggcgcggctggcccgcaagctctcccgccgggacatgccgcgggagctgattgagccccttatccgggaagcgctgtcggaagaccagaacatcctcagccaaatcgcccaggacctgatcgccatcgtggacagggatcccgcctgccgtacgccgctggaacccctgcttttttacaagggattccacgccatcaccacgtaccgtatctcccactggctgtggcagcatgaccggacaatcatggcccttcagttccagagcctggccagtgaagtatttgcggtggacatccatccggcggccaccatcggctgcggcatcctgctggaccacgccaccagtttcgtggtaggggaaaccgccatcatccgggacaacgtctccatcctgcatgaagtcacgctgggcggcacgggcaaggaagaaggggaccgccatcccatcgtggaatccggagttcttatcggcgcgggggctaaaatactggggcgcgtcaccattggcgcctgcgccaaaatcgcagccagctccgtcgttctggaaaatgtccccccccataccacggtagcgggcgtacccgccgttatcgtcaacgattccattccggacaatcccgcgctggacatgaaccagcgcctttgcaactgatagataacagattagaaatacgtcacttacagcagaaaacgaattaaatacgcaactccgcaaacatcagcgggaaaggtaaattctgaaaagaccggacataatataatagtttcaacctcaatgcattgaaattctcaatgcgcttattttgaacattttgagttgataatgaattcccaatctgcatactatatgggatatgcgtttaagattacccctctctctaaggtctgctttgcttgcgtgcagtgtcctgtttacaaccgtggcatccgcctccgtttcagacggaaacctcggcaacgtcatgtacataggggactccatcacccatggcgtcaacagcggctcgtggcgctgggccatgcataaaattttcacggataacggcgtcagctatactgaaaaaggcattatgaccggtaatttcagcggaggtgtggccgccggaacctcttacggtggtaagattttccagaatatccattcctctgcggcttccgcgagaacttatgaaatcgccgggagagcgaacggcagcaactacggacgatttgacggatccaacatcaaaaactggctgggcctgagcacggaaaagaccaagggagggtcctatgcaggacagacttttaccggagccaataaaccggacacgtttttcctgctctccgggaccaacgatctcctttccgacggcgataataattcactgttctatcgtctggatggagttacctcccttttgctgggagacatggattccatcgtctcttccatccgtaccgccaacagccaagcaagcattttagtgatgaccattccctgctggacgcaacattccaacgggaacctggctgaaacgcaccaggccgtagcctcctacaacgaatccctgaaggaatgggggacgaataacgccgccaatggcgtcaaggtcatcgacatcaacgcgggcatcatcgatgccgcctcctccacgccgttctacggggttcgctccatgttcaacaaccctacggcggacggcctgcacccgaatgcccaaggcgatctcctgatggcaggcaacctggccaaaggcatgggctatgccgggcggtcagccgggcaagaaaggaaagccacccatgagctggaggttaacttcggacaaaatccgtccatcacccagcagacgctggaggccaacggcttcaccgccaataatgtttccatctccaacaatacagtcaacttcaacaaatccggcagcagcaccctgacctataactggggagccgcccagggacagaacaagggctacacggtagatttcaccctgcgcctgggcaacggggccacggacggctgggacaccacaaacaacttctccctgaatctgggaaacggaacgctgaacattaatgaagcgtatatccaatggggcagcaccatcctttattccaaagacatgtccgccaatgcggacgccatccgcatagcctacgtggcgggagacagcgccaacggcctggacgcgggctattacatctggctgggggatgttctcatcggggaagcgcagacggcagcggggggaagttcttccggcctcacgttcagctattccggcacgctggacgccatcctgtccaatctggctttggacggttccctttcctacgccccctctaccaccggcatcactggcccagaatctctttatctggcaaatggcgcgtctccctccactctcaaaccgggcatgattgaatggactgcgggaaccgccgccaccgccgtagccactgccggaaccaatgccacgtataatgtccgtaacacaaccaattccaacattgccagcattacgggaacgggaagcaccaaattcatttacgccaataacggcgcttacggcagcgcgggtaaccgtcaggacctgtgggtgacgctgggagcgggaaccagcagcgccaacggctggataggcggccatacaacgggagacctgtacggtgacatccacctgcgcctggcggaaggggccatcggcaaatccacggtattcggcgttgtgaacgccggaaccgttcacggggacatttacctggaattctcctcatccaccggggtttacgatacttccttcaccaccggagaagcggaccgcacctccgtggcgggatcctatgcctccgccgtgaacggggacatcaccatggtgttcaatgacggcgtattctcccaccgcattttcggcggcttttacacgggaaataaaaccatctccggctccgcctcccttttcatcaatggcggaacgttcatgaatgaaatttacgccgggaacaagacggacggcaccatttcccggggaaccagcctgaccgtcacgggcacggacgccattctgggcaaggctgacggggataactggacgtggacacttctgtgcggaggcaataaaaccagcggcaccatcaacggaggcaccacgatcaccctgaaagatatcgccgccactaccggagccggaaccgaacatcagttcgacaaatacgccggcatcatcgacggcaagggagccgggacggtgaacggggagaagaagctcgtctttgacaactacgccgccagcttcctgggaacgctccagaattttgacaaagtacaaattaccgggaattcggatctctcgctggacaaatccctgggaaataccgtcacctccctgtccgtgaacgcaggttccaccctccggttcaaccgggaccaggacgccacgctggacatcactaacaacggcacaatccgcacctcgcacaacctgaccctcaaatccgcagacaccggaaccgggacctatcaggtggaaggaggaacgctggacctggccgggcaggccgtctccgggaaaatatccctctccgcgggggcgctctccaatacggcgggactgggagccgggagcgtttccgtctccggcatcaccgggaacgtcaacctgggcggactggacggcagcaagctgagctccattaacatgggcagcggtacaggaatcatttccggtctgacgggccatgcggacctgtccggttccgacacgcaattgaggctttccgccgccaacatgggcgcggacggcacgggaatcatccagttcaatgacgcggacaatgccagcttgacgctgggcaacctgaccctgacgctgacggcggatgccgtggcgctcctcgccgctccgggggactactctttccacgtcaccaacgccgccctgcacgcggataccaaccacattacgctgagcgaatacaacggcatggcgtgggacattacccggacggaaggcggccaggtaatcatctccttcggccagttgctggacgccatggtcattgacaagggagcttccaaaaacgtcacctccgccaacactctggcggcaactcccagcgtcaccaacaacggaacgctgaacattgacctgtccgcggccaccgcgccggaaaacaaaacaaccaccatccgctacctggccggcacggaagccgatgccgtcgtgaatacggggacggacagcgacgtgatcatcacgcttctgaatgaaacctccgcagatccggacaaaccgggcaacaccgcttacgcgggttccattgaaggagcggcgcagctcgtcaaggacggggaacagaggctgaccgttgacggcagggtaaccgcctccgctctggacgtgcaacagggagaactcgcgctccagaacacgaaggaaagttccatcatctccggcgccctgaacgtggaacaggatgccgcgctgacgctgaacgctgcctccctggccgccggggatctggcgggctccggctccatcaccctgaacgggggcgccctgctctccatcgccagggacactctttcagacctgacgctccacgcaagcgtcaccggctccggcaccctgaaactggacaactgcaacctgattctgggtacggacaataatctgggcgaagacgtgctgctccatctggggggcggcagcctgcgtctgcaggacggctccgcgatcgcactggaagggctccaccaggagcaggagaacggcgcgctccacctgggggctgacggacgtctggaactggcctccaacgacgggaaaacctactccttcaaaggggatatcaccggcacgggagccattacccaccggggcgaaggcacgcagatcatcctttcctccggcaacgcaggcgtggacgtcagccatacccggaccggcggtcatctcgttctgggagacaaggatctggcagcaaacggcctcatgacctacagggatattttcatcggcagcaacacccgggacgcctctgacctggacgccacggcagacctctccctgatgaataataccacggccaactcactttccatcgcctccaacggcaaactgtacctgggcggtaatcccaaccagagggccgttcagctcgtgttgaccggcaacaacggcggcgtggcggccactctggcctccggagcttccctggatctcaccgtcaatacggaaacgctgaccaatagcgcggacaacgcctgggccgccttgaaggcggaaaacggctccatccgcatcaacggaacggatccatccattaacgtcaacatttacggcctgggcgccgccggagactgggccatcctgccggaattcaccgttaacgccttctatgcggaaaacggactggtcacggcggacggggaaacctggacggaggacatggtgaacctgacctatgccggcttcgccaaccttgtctatgacatcagcaagaaactctccgacgacggcaagctgttccaggtccacttcaccaagcagggagacagcccgctgaaagacttcgcctccacgggcaaccagcagggcgcggcggacagtctgtgggccgtcacctcctcaccggaaaacatcactccggacatgatggaattccttaacgccatgggcaacgcccaggccatggggaatgcggaagctatccggtcagccctttcctcctatgcgggcagcggcattaccgccctgcattccgcccagaagggagccctccgggaccaggtgcttcacctgcgcaaccgcctctcccagatgggagtctccccgcagtacattcacgatgacctgcccggcttcaacgcctggattgaaggggaaggcggctaccgcaggctggatgaccggacggacgaatcaggctataagctcagcacctggggcggcaccttcggctttgacgtaacgtgcagcgacagcttcgtatggggggcggccttctccgccagctacggcgacctggacgcctacatggcgaacggagacctggactcctattacggcaatctgttcttccgcatccagtcgggccgctgggcgcacaacatcatcctcacctgcggatggaacgacgcttccctggaccgcaccgcgggaatccccggagccggcatgtacaccatgcacggcagcaccagcggcagcagctacggcgccttctatgaaggcacgtatgacctgtacctgaatgagaacaacacttccgcgctccagcctctagtgaatgcctccgtgtacaggagccggatggacggctttacggaatccggcggcctgggcatgaacgtggatgacatggactccaccttcggaaccgtgggactgggcgcaaggctccgcggagaactgtccgccaacctgacgggccgcgcctccctgggtgaactgcgggtgcaggttgtccagcttctgggcgaccgggacaccgcagccgtcctggcacccgccggcatacccggcgcagggttccgcgtaaacggagccagggaaggagccaccggcgtgcaggtcggagccggaatcaccattccggtgggttataccggctccgtctttgcagacgtcaatgcggactttcgcagccgcgccaacagcttcaacggaagcatcggctacaggctgaccttctgaccgacttcttcaggagtatatatcaacggaagcatcgcggccatgccgcggtgctttcttgtttacggcgggcctcctgctcaggcacggcctttccgcggaactcgggacgggtccttcatctgcccgtctccttcaataacatacttgtaggaagtaagttcccgcaaagccattggcccccgggcatgaaatttgtccgtaccgatgcctatttccgccccgaagccgaattcctccccgtcgctgaaccgcgtggaacaattatggtaaacgcacgcgctgtccacccggttcataaaataatcgcgcgcccgttcatcctccgtaatgatggaatcactgtggtgggagccgtaatggttaatgtgctccacggcatcacggacgccgtccaccactttcacggaaagaatcaggtcttcatattccgtggaccaatcctcttcttccgccggaatggcttccggaccaaaaaacgggcggcttcggtcacacacgcggcattccacgccgcgcaggcgcatgcgttccgccgccatcggcaggaaccgttctgccgcggcagcgtccaccagcagggtttccgccgcattgcatacgccgggcctctgcgttttggcgtcatccagcacgttcacggccatctctaaatccgccgccgcatccacatacacatggcaaacgccgtccagatgcttcagcacgggaaccctggcgtactccgtcacggcgcggatcagtccctttccccccctgggaataatcacgttcaggaaagaatccagcccgcacaactgccgcacctcatcacggctgccggaatccagaagctgcacggcgtccgcggaaacggcggactccttcagcgcggcgcgcagaacctccgccagcgcccggttggtccgcagagactcgcttccgccgcgcagaataacggcattcccggacttcaggcacagggcggcggcatcgcaggtgacggtgccgcggctctcgtaaataaaaccgatgacccccaagggaacgcgcacctggcggatatgcaacccgttggggcgcgtccattcccggatgcattcgcccacgggatcagggagagccgccacctgttccatgccgcgggccatgtgctccacacgctccggcgtcagaagcagcctgtccagaaacgcggcattgcggccgcctttccgggcctcttccatatcaaggccgttctcccggacaatcttttccgcagcgctccgaacgcctgcggccatcaggcgcagggccagagccttctcttccggctccagggcaagcaactcccgtgaggcctccagagcggtccgtcccgccggttcaagaggattcttcattttcataacttcatcccttcggtacaaaatatgttccgattccttccgctttcccctccagcagcagcgcgatgcgttccggatggcggccatgcagcatgtaaacgcccgtccccgcattcacggcctcccggatagcctgaagcttggcgctcatgccgcccatggaaaagcgcccctggtcctcctccgcgaacgccagcacggcatccacgtcctccacccgggaaatgatggcctcccgccttcctccggggggatacaggccgtccacgctcgtcaggataaacagagcgtcagcctccaccaggcgggccatatgcacggacaggatatcgttgtccccaaacttcaactcctccacggatacggtatcattttcattgacaatcgggataatgcctccgtgctcaaacaggcgcaacaccgtggcctgcacgttgcggcggcggagtttcaaatcctccgctgtcagcaggagctgggccacatccacgttaaagtggttgaaaagattctcatacgcctgcatcagccgcgtctgccccacggccgcgcacgcctgtttcaaggacagttcctgaggataggacggaagacccaggacggacacgccggcccctacagcgccggagctgaccagaaccacctgatggccctgctgcatcagccccgccagggcgctcaccagatgcacgatggaagaaccgtccaacgtcccattctctcgggtcaacacgcccgtacctactttaattacgattttcatgtatttccgccgcttatgatacaacaatccctttttccgcaaaaagcggaaaacgcgtcttttccgcgctaacccgtgaaagcgccggacgcaaaaacggaaggaattcccccttcttcttccataaagataaaaaggatcattccctccgactgaccggctccggcgcggatgaaatccgccatcccggccaatatctggacatccatgaaaaccaggggcggacaacaccggagaaaaggactggagcatgccgtccgacatgtttcccccggctttattccctaaagcgccatacattccggtgagcgtgccgcaaaaccgggagcggcatgcgcggcgcttccatcttcaatgcttttccccggtccggaactggcgccggagacgcattttaggcttccaatatgaagctgatccgctcatattgcccgggcatgaatcttgaccttctccaaaaagccgccaaccaggcgcggggactcgccatggatgccgttcacgactgtgcatccggccacctgggcctgccgctggggtgcgccgaaatcggggccgtcctgttcggcgatttgctcaacatctgcccttcacagccccgctggctcaaccgtgaccgcttcattctctccgccggccacggctccatgtttctttacggctggctccacctgtcaggattcaacatcggcattgaagatatcaaaaacttccgtcacaaaggttccatcacgcccggccaccccgaattccgggatacggaaggcgtagaatgcaccacgggaccgctgggccagggtattgcgaacgccgtaggcttcgccctctccgccaggcgcgcggctgcccggttcaacaggcccggcatggatatcttcacccagcacgtcttctgcctcacgggagacggctgcctgcaggaaggcgtcgcccgggaatccctcgccctggccgccgtgctcaagctggataaccttattctcatttacgattccaacgacatcacgctggacgctcccgcggaacgtacccagcttacggatccgcgcgccgtatacgaagccctgggctgggatgtgcgccagattgacgggcacgacatcaaggccattaagtcagcggttgaagccgccaaaaacgccaaaaacgggaaaccccagctcatcattgccaaaacggtcatcggcaagggcattcccggcattgaaggcaccacaaaaggccatggggaaggcggggccaagcttcaggaagaagcgcacgccaactgggaaattcctgccggagaacgttattacgtctccgaagacgtccgtaccgctttcgcagacctgaaagcccaacgggaaaaagatttcaatgcctggaacgccatgtacgaacaatggcgccgggcttatccggaactggcagaggaactggacgcaggcatcaacgcctgctcctgcggcgtcaatccggcagactcggacaaggcaataccgcccttcccgcaggactatggcgatgctacccgttcggccggagccgttgccatcaacgctatcgctaaagcgaatccctgcttcctgaccaccagcgcagacctttacagctccaataaaaactacctttccggcgcaggagacttctctgcggaaaccccggaagggcgcaacttctggttcggcatccgcgaacacgccatggccgccatctgcaacggcattgcctacgacggcctgttccgcgtaagcgccgccactttctgcgtcttcgtagactacatgcgcgcctccatccgtgtagccgccctcagcggactccccgtcacctatattctgacgcatgactccgtagccgtgggagaagacggccccacccaccagccggtggaaacaatttcaggcctccgtgtcattccgaacctggatgtcatccgcccggcggacccggaagaaaccgcaggagcctggatggccgccatgcagcgtgccgacggccctaccgccctcatcctgacccgtcagaaagtggctacgctgaacggaatccccgttgaaacgcgccgggaaggcgtgctgaaaggcgcctacatcgcccggaaagaacagggagccttgaaagccattattcttgccagcggttccgaactggaactggctctgaaagcggcggaaaaaataggggaaggaatccgggtcgtctccatgccaagcttctgccgctttgacgcgcagcctgccgaataccgggaaagcgtgcttccctcctcctgcatgaggagagtttccgtagaagccggagtcacggacctctggtggaaatatctgggctgccagggggaagccgtgggcatcaaccgtttcggcttctccgctcccggaacacaggtgctggaagaactcggcatgaatgtggacaacgtcgttgccgccatccacaaggttctggccaaataaacagggaatatttcccttcatctcctttcagaggctgttccgcatccgccgggacagcccctttttcatgcctccccggttgccaggaaaaaggcaaggccgttttcacgaaacaccagtatccgtaacgcaggaactatatcctttcctgtgaaaattccgttcgtttcccgtccggatttctctaaatacaagacctccgcacatcagctccattgtccgaaccggacccggatgggactcaggccgcaaaagccccggttgcaagcagcccgttttcatctcagctgccggaacggataatttcaggtttccttcatggcgccgataaatatgcggggcggccatgatcaagcgccgcctctatcgacgatgcgatgaaccctaaacccgcaaaataacgagggtccggcccatcaacaatgaaaaaccgcccctttccgaaaaaaggggcggttttaaagaccttggcgacaagggaagcggctcctttagaacgcggcttcaatcttcgtaatggtatacacctttttcttgtcgccgtccatcgggacaatcttcacctggtcccctacacttttgcccgtcagctccttgccgacctgggaaagataggagacgatatgcttttccggatttgtgtcccacgcgcccagaatggtgtacaccacgggctccccgccattcaacggctgaagagtcaccttcgttcccatggcggcgcgggaggtatccgtcacggcaaagtccgtgccgcgggccagggccagcgcatgttccagttccgcccggcggcggttgagcaccttctccacttccttggcatcctggtagccgccgttttcgcggagatccccctccgcacgggaaatcttcttgttatgcaggttttccggaattttcacgtttaccagttcttccagctccttcttgcgggcctccaggctttcccaggaaacgaaaatcggttccggtttgtcggagttgtccaccagggcgtccagcacaatggcgtgcaggtctgggaatacgctgatgatgcgggccatcagcgcgccgcggtcctgttcggagaaagcggaggtgttgtacagcatcttggcaaactggcggacttccgccacatcctgccccttgatcatttcctggatgatgctcttatcctccatgaacaggttcttcaggcgcagcatgcggttggggccgccgtccatgtggtcctgttcaatcagggaaagcatcgcaatgcccacagggaggccaaaaagaggcttggaagcgtcatgccgctggcggcatatccagatgagggactccgccggaagggtctggcgcagcaattcatgcttcaaatgcttgaccagcaccttgtcctgcccttcttctatcaggaatttggcgatttcccccacggcgcgggcgccgcctgcatcaaaaagctccagcgccttctgcggccaatcctccccaaagatggcgggcagcgtggcatacacgcgcttctgccgcacggcaggcatggaattgagcacttccgcgaagcggcccacatcgccgatattggcttccacgatggaacgaaggggataagcttccttggccgcctccgtatttttaagggaggcaatcaggtcatccctgagcacggccagctccagcacctgctggagagccaggctgccgccgttgcgcacatcagcatccacggcacgaatcagggcattgacggcatccggctctgccatgaccgcttccattttgatgccgtccagcacgcgcaccttggctttcaggtcggcggccttattgtaatcttccagagccgcctgcgcgcgggaaaggatattcgcgcgaagcgtgatgcgttcgcccttgcgggtgggcatcatgaactggacattggaacggagcatggcgcgcaccttgtcccaccagtttttccacttgtccgccgcaattacggtgcctttcagcgcggcttccagcttctccggagtaagggaattaccgtagccctgcaaggtaacgcgcaccagttccaccgggtcatccacggacaggttgatcagggattcggtatcttcataccgcttggccaggaaatggtcgtcactgatgaactccaaaattctgggagcgaattccagggcaacttcgtgttccggattttcctcaaaatcaatgaccagctttttggcggggagattccaggaaatgacttttccggcgccccaggaagcatggaagcagtaacggccaggtgcgatgcgatcaagtttttcggcgagagagggggtaattttccccagagacaataatttctccaagtcggcgtgcatactaaagcacatgatacgcccccccctaccggtatcaagactaatttccctcttccgtccggactccctccgtgcggcttttcaaggttgccccggagactgcggccgtctgcgtcatgctccgacttcgcattcgggtttcgcttctttttccctcccctccttcatccagttgcggcttgaccgtgcggagcgtctggcgtaacatctccgcacgcattcaacccctgcgcaacacgtatcatggaacctatttacgaagggaaggccaaacgcctttatacgactgataatcccaacgtcctccgcatggaatacaaggacgacgccactgccggaaacggagccaagaaggcccagtttgaaaacaagggcaggatgaacaaggccatcaccctggtcatctaccgcatgctggaaagcaagggcgtgaaaacccacctggttgcggacgtggacgacatcaacattgacgtaaaaaaggtttccatccttcctctggaagtgatcgtgcgcaacatcgccgccggctccttcagccgccgcatgggcgtcaaggaaggaacccctttcaagaagccgattgtggaattctcctacaaggatgacagcctgggcgaccccttcattaatgacgactacgcccgtgaaatgaactccgctacggaagaggaatgcgccttcctgaaaaatcaggcccgcatcgtgaatgatgtgctgattgactttttcaaacaggccggacttactctggtggacttcaaaattgagttcggccgcttggcggaagatccctcccaaatcgtgctggcagacgaaatttctccggatacctgccgcctgtgggacatcaagaccggcgagaagatggacaaggaccgcttccgccaggacctcggcaacgtgatggaagcctacgaagaagtcctttcccggctccagaacaaggcttgagcctctttcccccctcccatgggagccggtctttccgccggcccccatttttcattttaccacactcttgagcaatatgaccctccactttgaagttatcaaccggttccaggccgccgccagtgcggacgccctgctctatacccccctgaacgccggcctcactttccgccgcagccgcgtttacaccgtagaaatcaccggggacggacaaaaagcccgcgaatacctcctgagtgtactggtggaccccatttcccaggaatgcacggaacagaacgcgcccatcctggaaggcgccctgttcacgattgactacggcatgaaagccggcgccctggatctggaaaaagaagccatcctgcaaaactaccgcgggcgccggaatatgggctttactatggacggcctgaaaatcacccagcgcgtgtacgtcttcggccagggagacaaggaaaccctggcggcgcgctttgccaaggacgtctgcaaccccgccattcacaactggaccatcgcctaaccctttttcttttccatccacatgtccgccaaaacctaccgaaccgttcccgtgaggaacctgagcagcgacgaactgcttgaactcagcaaaaagcagaagctttccctgtcccgtgaagacatggaagtcgtccagcagattttccgggaaatcgaccgcgaccccactgacgtggaactggaagtaatcgcccagacgtggtcggaacactgcaagcaccgcatcttttccgcctccatccgccacagcgtcaacggaggcgcgccggagacggtaaacagcctgttcaaaacctacatcaaaaagccttccgagaagatcatggaacgcaagccgggcttcgtgctcagcgcgtttgacgacaatgccggcttcatcgccctggatgacaacctggccgtctgcctgaaggcggaaacgcacaaccacccctccgccattgaaccgtacgccggggccaacaccgggctgggcggcgttatccgcgacatcctgggcgcaggcaagggagccaagcccatcgcctccctggacgtcttctgcttcggcgctccggacacgaatccggcagacatcaccgccccggacgtcatccaccccctgggcatcatgcgcggcgtggtgcgcggcgtgcgcgactacggcaaccgcatgggcattcccaccgtcaacggcgccatccagtttgaccccacgtacatttacaaccccctagtcttctgcggcaccgccggcgtaattccgcgcggcgacatcctgaaggaaatgcgccccggcctcaaggtaatcgtcattggcgggcgcacgggtcgggacggtctcaagggagccacgttctcctccgccgctctggatgaagcctcccatgaggaagacttcaccgccgtgcaaatcggcaacccgattgaagagaagaaaacgctggacttcattctggaagcgcgtgaacgcggcctcatcgtcttcattacggactgcggcgccggcggcttctcttccgccgccggagaaatgctctccgtcacaggcggtgaaattttcctggacaacgcccctctcaaggaacccggactcatctcctgggaaatcttcctgtcggaatcccaggaacgcatggtcatggccgtggaggaaaaagaccttccggaactccggaagctggcagacaccttccagacggaactgaccgtcctgggccattccgacgacacgggaatcctgaaggtctggcacaagggggaactcgtctgctgcctggacaactccaagctgcatgacgcccccatcaagaagctgaaatccgtattcacccccggcaaggcgctcacgggccagctcctcccggacaaggacctgaacaaatccctggaaaccgtgatgggagacttcgccatcgtttcccgggaacccatcatccgcgagtacgaccatgaggtgcagggcaacaccatcctgaagcccctggcgggcgcgcaggcggacgctccgcaggacggctccgtggtggacatcgacggctcggacaaatgcatggccatggcttgcgccattcttccggaatggggtaaaacggatccctacgccatgggtaccggtaccgtggacgaatgcgtgcgccaactcatcctggtaggctccaatccggacaaaatcggccttctggacaacttctgcatggggaatccggaagatccggcggaactcggccgcctggtggaatgcgtgaaggccatcgccaaggcggcggacgcgtacaatgcccccttcatttccggcaaggactccttctacaactattttgaaacggaaaacggccccatcaacgtgcctgtcactttcctctgttccggcttcggcgtggtggaaaacccggaccacgtcatcggttcttccctgaggcggaacaatagcctgctgtacctcatcggccatacggaagatgagatgggaggctccgtcttcgcccgcacccacggtgtggaagacggcaaggttccccagacggactgcgccgcgaacatggagctgtacaaagcctactacagcgccctgacttccggtctggtgctctccgcccatgacgtttccgaaggcggcctggccgtcacggctgcagaaatggccttttccggcaagggtggcgttcggctggatctcacgaaggtaccgactgccaatggctggaaatccccggcagtgcctctgttcagcgaaagcacgggccgtatccttgtggaggtggatccggaattcgccgcggattttgaaacggctatggacggcttcccctgcgcctgcatcggcggcgttacggaagaaaagcgcctcacggccacctgctgcggcggggaaaaggtgctggattgcgacatagccaacctcaaaaagctctggaaggacggacttaccccctattattgatcccctgaaaccggcatcttaccaaaccaacgattcatttctaccaatatgcctcacgcacttttattgaaataccccggcaccaactgcgacgtggaaacggaacgcgccctgcgcgcggcagggttctccacccagatccagcccatcgccacggctacgccggaacacgtcgcaaaatcccagcttgtcgtcctgggcggcgggttcagctacggggactacgtcaccagcggccgcctggcccagctggaaacggaacgcttcctgggggatgccctgcagcggcatcatgccggaggaggcatgctcctgggcatctgcaacgggttccagattctcaccaaactgggcattcttcctgactccagcctgattgacaataaaaaggaacgttttgaatgcgtctgggccaaactggtgaaagtagccaaaaactctcccttccttcaaggcctgccggatgaattcgaactgccctccgcccatgcggaagggcgcctggtcacccgccccggagatgcggaaaaatacctggctgccggaaatgtggctctccagtacgtagacaaccgcgacggctgtgaatgcagcatcgccggcctccaggattccaccgggcgcgccatgggtctgatgccccatccggaacgctttctgctgccccgccaccactatgacaaggactgggccggcaatgaagactggggctgggggtacttcctcttcaaatccgcttttgacgccctgaaataaaggttcattccccatcaaccgcttccccccgcattcattccatgacagatacggctctcatcggttcttcctgtgccctcggcgttttctggtcctcaaaacggtactttgactacctgattgatgaaaccaacctgtccctgctgcgcggcaaggaattcgggcaggccgtcattatctgcccctccctccgggaagggagcacggctattcggcggaatacggctccctttctggctcaggttaaaaccctgattgatctcctgcatgaggtgaaggcggaacgggtgacctacatcaccagcattgatacccagccggaaacgggaaatgaactttctcccttgctccgtgaaccggaagacgaatggctggcggctctggtggagctgaaagacttcatcaacctccggttcggccgcgtgctgaacgtttaccttccggaagtcaccggaacgggagccggcatgagtgtggcggatctgctggcggaggttccggagggaacggaagagctggacgtggctctgctggagcgccatcagctttatcccatgcaccgcctggtcagggacgtggaaaaagcctgggaatgcggcatcttttccgtgaatctggtgccggaacccgtcactgcctttgaactggtggagcagtgcttccctgccctggtcaaccgcctccccgtcgcgaaggaaacggacccgtacggaagcgccagaacatccgtttactccactcaataccacgatccggacaccggttatatcatggacaagcaggacgtcctggcggggctttccccggacaaacagtcctagcccccggtcaaaaaaactttttccaggccccgtctgcttcctgcgcagtcggggctttttattccccgccctcaaaaagagctccactgcaggagccgtgctttcctgttgagcgcatgccggaacggtgctatacaaaagccatgaagatcagcgacgacagccttgaattcttaacggaacttctggaaacccccagcccttccggctttgaaatagacgctcagcgcatctgggcggacgaactgcgcaaatatacggaatacgtccagtgcgacacttacggaaatacctgggccgtcttccacgcggacgcggaagaagcccccacattgatgattgaagcccacgcggatgaaatcggcttcatgatccgtcatatcaccaaggacggcttcctgtatgtggaacgcgtaggcggcacggatacggccatcgcgcgggggcgccgcgtgcgcttcctgggttcccagggagaagtgatgggagtaaccggaaacacggccatccacttgcgggaacccggagaaaaggaacccaagatttgggaaatttacgttgacgtaggcgcctcctccgacaaggaagtagcggaactcggcctgcgcgtgggacatgtgggcgtttactgcgacggccccatgctgatgaatgaaaacaagctggtatgccgggctctggacaaccgtctgagcggcttcatcctgtcggaaatagcccgcaagctgtgcaagctgaaaaagcccgtcgcctggaacgtggtgctcgtcaacgccgtgcaggaagaagtgggctgcattggcgcgggaatgattacccaccgcctgcgcccggacgcggccatctgcattgacgtgactcatgccacggactcgcccggactggacaagggcaaatttggcgatatcaggcttggcggcggccctgcggtcatccacggcacggccaaccatcccaacctggtggcccgtctggaaatcgtggcggacaagaacaaaataccgctccagcatgaagccgccggacgccgcaccggaacggatacggacagtatctacatctcccgcgacggcgtagcctccgctctggtgtccgtccccctgcgctatatgcattccccggtggaaacggcctctctgacagatgtggaaaatacaatcaagctgctgctggaactggtcaaatccctgacgccggaagactctttcggccacaggctttaatacggagtatacggcggcatcgttgacaacataaggacatgaaccgtcctgccggggaaaggcgcgcaaaaacggccatttccccggcctgcttccatgcggctgcatggaagcccccttatatggagcagggcgtaaccattggccttgcaggcgtcctgcggcttcattcggtattaccatgcccgccgtcactacccgctcgatggttcccggcctcctctcccggaacattttcccggaaattatcccgaaccggaaaacggcaggagtctttccttccggtcacatttcactaaaatccagccgggtcacattaaaatacgtttttcccttccggcaggaatcccacaggagaatcagcatgaggaaaaagaggaccagcctccaggccacttcaaagggataactggttaccgccctctccacgccgatgcagttgcaggagagggaaagccccctggcccagccctggacgaataacgccacgaatgtgaatgtcagcgcgctgcccagcagcgcggccccggcgcaggttctgcggaacaggagccccagccccaccacaatttcacacgacacccccaggcaggccaggggatgcccccaggcctccgggaaaatggcgaaacggtcgatcgtctcctgaagctggtccagatgaagcagcttgcgcaccgcgacgaacaggaaaaagcctcccatccccagccggagcaggagcaggcaaaaacggacgatcttttcccttagcatcattggcgtattccgcttattcgaagtgggtttgctgggcgctcactttttcattgcgcaacctgttcagttcatggcgcaccttttccagctccatctgaagggatttctcccgttcggagacagaggccgcggcggaagacggcgtcccggcagctttcttcccgcagcctacggcgtcttccgtaaagagcattttcaacccgggagccttcgtgtcaaactttataacgccggaaacaggcttttgggagccgggatgcttcacggaggccctcaccgtcaccgtgccgggcttggcgcccagacgcaccagagccggagcggaaccccatttaacgggctgggtcagcgtgccgtccggggaatccgtcagcagctcggcaggaccttccacggaaaagacaatctcctcatcattcaggcgcttcactgttccgcggccatccgtaacctccgccaccacggcaaacacgtcggaaccgttggcgtacaaatccactccatcttcccggtccagagtcaaccggatcttctccgccctccgggccgggcggacttcatgcctgaccaccaccttgccgcctatcagaccttccgccaccagtttcaccgctccctccttgcctcctcgggcaagcttcttgttttccatgaaatcccaagctttagggaacacgacgggcacgcgcttgaggcctccgggacaggacgccaccttcttttccaccgggggtcctccgttgacactcaggcgaacggaatcacaattggaaaacaccgtcacgtcttccggagaaaagggagtgcattcattggcgatgtgcaccacagggccggaacccaacccgtttcgcgtcttctggggacgctgggacataaatgcgtaataggaggttttgggctgcctgaaagcatccagaataccgccgtagaagggatccggatggtaaccgcgctgatggtcgaaaggatgccacaggcagccgccgaaatgataggccggagcggcgttcagcgtatcgtacgtcgtatatgggaacgaggtcttgaggtagtgaagggcctgcaccatcatgggagcttcaccccagtgacgggctacacgggaggtggagttgtgggcggaccaggtatccacgttatcaccgaattcacgggtaaaatacggtttgctgttcttccgttccttgatggaccagtgtttgtcccccgtaaccgggtgggcatacagaacttcataatgctggctgccctgagccaccgcgtcgcaagcggtgtagcatcccttgtacggatattcctcatgcaccaggtcgcgggcctttttggcgaaatccgccgggtaatgagtttcattcaaaataggttcccacatcatcacggagggatggttcctatcccggcgcaccatctggcggatatcgtcatacacccggtcagcaaaagggccgctgccccagaactgccagcccggcgtggcgacgatgacgaaaaggcccagacggtcgcaggcgtccatgaaagccggatcctgcggataatgggcgctccggatcacgcgcatgcctgccttcctcaatttcacggcatcctgccattgcaggttgttgggcactgcattcccaagccgggcaaaatcctggtgcctgttgccgccaatcagcttttcaggaaacagggatccattgagcaccagccccttttccgtaatttccaccgtccggacacccacccttatggaacggttgtccagcaaatgggccggatctttggaatggtcccctccaacagcgtcccatacttccacgctcaacgtgtacaaatcgggattgtccggagaccacggtttcacgttggaaagcacaagaggaatatccacttcacccgtggaatggggcggaatagtcagcggaaccgtctccccggcaggatccacccccttggggtccgtcatcaccgcctgcacgcgcaccttccgttccttgtctgcctggttggccacctgaaccttcacccccaccttgcccttgcgggtacggggatcaagaaattccgtccggaaaaaaactccccctccggccacagttccggcctcgttcgggtccgtgatatacacgggtccggtggaaatgaggtacacatcccggtaaataccgccaaaataggaaaaatccaggccttcctggggtttgccggggggataggaagcgtcgttggaattgtccgccttcacggcgatgacattcttttgtcccggtttcagccacttgtccagattgacaatcacgggaagatatccgccgaaatgctccgcggccttctccccattcacccagacctcgctctttcccatgatgccctcaaaatacagggtgtttctcctcccctccaaccgggagggaggaataaatgttttccggtaccataccggcccctggtagttggaacagccgctggcctcttccggaagaagctcaatgccgttggggaggttgacggactcccaggaggaatcgtcaacatccgggctggccgcttcctccggtgtcttctctcccttgaacagtttccagcccacattcatgccgtaaacgtcccttttcgttacgttttccggcaggcgaagagcccctgccacggaataggctcccgtagatgaagcggcctcctcctgatcggaaaccgcatcggcataaagggaaaaagagccggccagacatgccgccgttatgagaatggtagtgactttcatcatggaataggggaatgcaaaattaatatacggagctcccccggcgccatctttcattcatataatacatccttgcgtataatgcaaatacatatgtcatccggcatcttccgcttgacctggaaggcatgttttttcatagtcgactcgccctgtacgggattatcccgcagccccggtccgagtgccaggttttcagtcccgtgaaaaggaaaaagcgaggcgttcctccaccggctgtctcagggctatgcctttatccactagttttttatgtcatctttctttcagaaaattgtcaaacttttctcctatgacattggcattgacctgggcaccgccaacaccctggtcaacgtcaaggaccagggcatcgttctgcgcgagccttcggtcgtcgctgtcaagggggacaaggttctggccgtgggagacgaagccaagcgcatgctgggccgcacccccggctccgtcacggccatccggccgttgaaggacggcgtcatcgccgacttctacatcacggaggaaatgctccgctacttcatcaaaaaagccacggccaggtactacctgattaagccgcgcgtgctcatcgccatcccctccggcattacggaagtggaacgcagggccgtcaaggaatccgcggaagcggccggagcccgccgcgtgcatctgattgaagaacccatggccgccgccatcggtgtgggccttccggttcaggaagctgcgggcaacatgattgtggacatcggcggcggtacgacggaagtggcgcttatttccctttccggcatcgtttacagccgttccgtccgctgcgccggggatgaactggacgatgccatcatctcctacatgaggagaacctacaatctcatggtcggggaacgtactgccgaagacatcaaaatccgtatcggctccgcctatcccctgcctcaggaactctctatcgaggtcaagggccgcgacctggtcgcgggcctgcccaagacagtgacgattcgatcggaagaagtgcgtgaagctctcacggaacagctcaacacgattgttgacgccgtgcggacgactttggaacgctgcccccctgaactggccgccgaccttgtggaccgggggattgttctggctggaggaggcgctctgctgcgcggtctggaccagctcctgcatgaacagacgggactgcccatccacattgcggaagaccctctgagcgctgttgcggaaggtaccgggaaagccctccaggaactggacttcttcactaatgttactgatgcggaagactaaagacggaatctccggagcaagcgctccggccttgcgtctgccgtactgccgcatcacatcaacgcaactgcctgcatgattcctttccggccatccctacagcttcaactccagccgctcctgacgggagacggcccaccggaaacattacgggcaatagcacaccctagcttattcacaccccgtgtttacaaaaatgcttaaaaaaatcaaacgggccttcggcttcggatcctgcgatcccatggaaggctccactatcatcatcaatgccgaaaagctcgaacgccgcgtagcccttctggaaaacggcgtattggaagaatacaccattgagcgcgaaggcgaagacaacatcgtaggcggcattttcaaaggccgcgtcaagaacatcgaaccgggactcaaagccatgttcgtggacatcgggcaggaaaaaaacgcctttctgcacttctgggacgcgcttcccgctgcactggactccagcctggaagaaatcgaacgcgaaggccgtccgaaaaaacagcagcgcaaaatcacgtccaaagacatcccggacatctatcccatcggctctgaaatcatggtgcaggtcaccaaaggaccgatcggcaccaaggggccccgtgtcacaacgaacgtatctctggcgggacgctacctggtcctgatgccctttacggaccagttcggcatctcccgtaaaattgaagaccccaaagagcgcctgcgcctgcgccagatcatgcagaaactgaatgttccggacggaatgggcatcatcatgcgcacggtggcccaaggccagcgctaccgccactttgtccgcgacctcgccatgctgctggaacaatggtacagcgtggaagaaaagaaggaggccaatccggcccccgtctgcgtgtacaaggaaccggacctgattgaacgcacggcacgggatttccttacggacaccgtagacaacatcatctgcgacaacgcggaaaccacggaacacatgcgcgccattgccggaaaaatctcgcgccgcgccaagcgccacatccagcacttccccgtgcgcacgcctatctttgaagaactgggaattgaaaaacaaatcaatgaagctttccagcgccaggtgctcctgccctgcggaggctacctggtgattgacgaaacggaggcgctgatcgccattgacgtcaacaccggacgcaacaagggcaccaaggatctggacaagaccattctggataccaatctggaagccgcctatgaaatcgcccgccagcttcgcctgcgcaacatcggcggtctggtagtggtggactttatcgacatgcgccacaggaaggaccagcaggccgtttataaggccatgaaggaccgcctgaaacgggacaaggcaaaaacccaggtactgcagatcacccccatcggcctgatggaaatgacgcgccagcggctcaacgagagcctccgggaatccgttcatgatccatgcccgtactgcggaggcaggggccgcgtcaagtccgtgatgaccatgagcgtggaaattcagcggcaaatttacgcctgcatccagaaataccgggacaccatcggagacatggttatcgtcgtcaactcggaagtgctctcccgtttcaagaatgaagacgccagcctgctcatggaactggaacgccagcacagcggaaggctgattttccggggcgaccacaaccagcaccgtgaatccttcgccatttacgacgcccgatacgacaacaaacccctctaccagtccgggcaatagcctgaaaatcaaatccggctttccgggccgggcgataccctcgcccggccttttttacgccgccatgaacaacatccccacttcccccaacgaccccgtcaacacggacattctgctggtggcggaagaccgcatcaaagggttccgccgcctgcccttccacgccatttccgaacaatgcggacatcctgttccggtggttatccagcggctgaaagccatgatggaggccggagtagtgcgccgcgtgcgccagacgctgctggcgaccaagctggcccagggagccctggtggcctggtccctgccggaggaaaaactggatgccgcttttgactggatgaaggagctggacccttttacgggccatgtggtgctccgcaatacggatgcggccaaccccggcgccaactacaggctctggaccacggtcaaggtgcccgtggggtgcggtacgccggaggaacactgcggcatcctgaaacgccatatcggcgcagacggttatgttctgctgccggcacgcggcgtctttgcgctgggggtggggcacatgcgccgcaggggactcaggcccggagaaaaaactccggaaccggcccccatgcaggaaacgaaaaccgtatctctttcagaactggaatggaaggtgctcctctccgtcaaggaacagctcaggcctgaggaaatggtggaagatccctggtccctccgtgccgcccgggcaggattggaaacggaagaatactgccgtacggcggaagaactggaccggaagcaggtcatcggccgtttcgccacttttctggaacatgtgagagccaaaacggacgacggccccgttaccaaatacaacggattgttccattggacggttccctccggcatggaaatccgggctggagcggaatgcgggcgccacatctgcatgacccattgttattggagaacaggcggagatgtttttggaggagcgcaaatcatgggtgtggtacacggattggaaaaagatgccgttctggagcacaaggcggcgattgaccgccatctggaggcttccggcattcccatcctccacacggctgttttctggggtgaacgttcggaaatcaagccttccgagatttctccggaactgtataggaaatggatggaagaagtaaaaaaagctcccgttctgcagtaactcccttctccacgcccgcctccggcggtcttcccctggggtagaacagcttttccctccgaactcccgcgaatgccgtcgcgaaggcacaagcatttttaatgctgcaactgagatgccggctgtttcccctccctccgtcctgcagcaccgcttagttccctattcccggcctacagcggcttaataccgttttcccggacgttccaggatctttgatatattttcctgtcaattcaggaaacgggactgaagaaatccgtttcaagccttcaggaagacgcacgcctcaacctgatgagctattcatgttctcctttgctccggcgctgtttcctttccgggatacaccgggagaggcttctgcctgcagaaacaagaaaaactcaacacaagggccgtctccccccttacggggagacggcccttattaaagaaatatcggccggcgaacaacctgccgcgaagctttattactgctttttctacggctgtgcgggagcctggtcaggagccttggcgggagcaacagcggccggatgcttgtaggaaaccgcaaaaccgtcatacttggccggcagcttcctgtccgggaacatcagttcatgcaaacggtacagggcagccgcttccttgacaggagcgggacgggacttcagccgtgaatccggaatcacagcttcgggattattcttcctggattccacggcagatgagacgacgggattctcaaagaatttgacaacatccggcatgcgcaggtaggcatccaaggagcgggccacgcaggcagacgccagttcttcatcggaaccatgcagcaaaaccagggcttccgcaaaataatccagcgccttgttccaatcctgggccaccatggcggccgcacccagggcatatttcatccgcgcctgctggaggcgggtggcattctttttggttgccaggaaagaaccggcacggcttttcacgccgttccagtccttatccggaatcaaggccatgatttttgccacctccaggtcattctggacggaaggggacaaattggcccctctgacgggaaacttggccgccaaccctttgactccagcccaatccatcatgcgcatagcgcactccagttcatagacagccgcccgggcggacaggctgtccttgatggaaagcgttgaggcatacttattcaccagagcgtggaatttgttgcgggcttcctggtacttccggttttccatagccaccttggcatccacaaagtcgtccgtttcaaaaatatacagcgtcttgaaggcgctggccatctgctgaaggactttctgggattccctgctctccacaaactggaccgtgggtccattggcggaaagaatgtagatatccgtcggacggccattcttgatggtcggtgcggcaactctggcgcgcaggcgctggggattctgggcattctgggccatggacggaaccagggaggacagtccggccaataccattattactgaaagtgctttcatatgattgattactaaacctcttgttattatttctggcccttggcggcgcgtacggctgcttcataggcggcaatgtccgcccgttcctggctgacggcaggatcggaaccgaacttagccgtcttatccttcacctcattgaccagggcgctgtcctccgccgtcatcttcttgcggttggcgggagtatccagcaactgcacgtactggctgccggccttccaagcaacgtacctgtcggaaggctgcttgcccgcaccctgggacatcgtattcctcttccacagcgtatccatctgcgccagcacggcgggggcggaccacttcacgagccccttgtacgtacccgtgatgttcatgaagttaatcaacgccttgtccagttcattctgcttcaggtaggcttcaccctgcaaatagaggacttccggcagattcttcttataggtcttgttttcgcggtacttgtcggcagcggcaatgacggccggccagtcctggcgggcggaagtgaacttgaccagattgtactgggcgtcttccatggctttgcggtccgggttggagctggattcttccttgctcagttcatccctcatcatcttgatggcggtgtccaccttggcgttatccttgctgcgccccagagctacggctttcccgaagaccgcattcttgcggtacttggacatgccgttgatgcgagccttcttacgcaccggatcaggttccgacgggtccaggatttcatcaaagtaagcgatgctttcttcaggctgggaagtgccggccaggtgcatgccaagcttcacaagcgtgtacgggggcagatcggaaggtttgaagtcgcgcttcagctccacgaagagctgcttgaccagaccttccaaggcggctttctcggcacgctgttcgtccgtctccacaggagccttttcataccgttcctgagtttgggcaataacggccatgcgaagcatggcgctcagcgtcttgtctttatcattgtccacgccggggaaccggtagaagtggttgcgcatggcattggcatccagattgcggcccagggcctgattgccggccatgtacgtcttggtataggaattgacggcttcttccagaagaacggtcatcttgggatcgtccttcttgccttccctcacaataatttcctgcatcttgacggatgccgggtcaaacatctccttgtcatccttgaagaattccatggcggcggcggccagctggaggctgtagcggctgccgggctggtcgctgtctttccagtactcgtcataccatttcttgacctcgtcccggcgcgccgtcctggccgtttccacggcttccttcggttctaccggaagaggcttcttggtagcgttaataaacaggttgtacacggcctccgcagcgggacgcttgtcgcccagcttcttggcggactccagagcggccaggaaatagccttccgcttcctgctcatgttccttgctgccggcatacagattagccagcagattgttggcatacgggaacaggcggtgatctttgaaattgtccacaatttccttcgcatctttcgcggcgagctcttcgtctccggggttcttgcggtttaggtagttgaaggcccggtcatacaatacggcggccatattggcctcacctttgtccgggaaacgggcaatgtaattggtaaaggaccggatggcttcatccgtattgcccaggttcgtgtaggtttcaccaagaaggtacatggccgttttcagataagtgctgtcacggtattccttcacgaagcgttccagcaccggcaccgcttccttataacgggaggcgtcggcagcccccaggttgaacagggaggctcctttgcagtacagggccagttcatagaacttatgggtggggtcatccttatgcagctccatgaccttgtccgcctgctgaacgcagagatcgaatttcttttccttcagaagcccttccaaagacagcgtattaagcatgggagcatacttggaattggggaattccttcaggtgctgcgccacaagctcgcctcccttgtccgcttctcccagctgccaggtggtcattgccagataatacaggttatcctccctgcccggagcatccgggtaggattcattgataagctggtaggcggcgcgggcaaccctttgggaaccatgcaccaaggcctggttgcccatgaagctgaacgtaaaagcgtccatgacctttccttcctccttcatcttgttgaactggtcgatcagggctgtcaccttcgctctgtccagcgtatgggaaaaatccgtcacgccaggcacggccccgttggcacggcccagacgatccagggaataattggcatccgccattactccggactgatcgggaagaaggcccatcagcaccatcgccagggaagcataatcttcagactctttctgttttccatcctgaagcagggaacgggatttctccagcacttccgcaacgtagctcaccagccgcggagtgtacaaagccacacgcgtgggactgatattcatcacggaagggtagttttccacaaacttcaccgtctcactgcatttgccggtcttaatagcggcatccaccatcgccaggaagccattggtaataacggcatccgtaatgcggcggcccttgtagcgtgacgtaacgcaagaggtaaggttttccattcctttttcaaaagcaggcggggacatcttgaaatagcattgggccagaagcccctgcacttcaccggcattgacgtttctggcgacaggatcgctgcggtattctttcaagaatttttccagcagctccgcgcccttggcaaaatccccaagacggcagtagttttccccttcccggaacagggccattttcacgagctggtttttagcgctcgggaacttggtgtaacaagccttgaacgcttccacagcttccttgtaattcttcagctgggccagacagacgcccttctggtaatagaaccagccgaagccgtcatccagccccagcatcttgatacggggttcataaacgcggatgcagcgatccacggcatccagggcctcctgccacttcccttccttaatggccgtcagggccgtgcgctggtaatcgcgcgggccatgctgagcgccggatggaagaaccgccccgatactcagcacggaaaccaggcctgcagccagtgcagtagtatagtttgatttgatcatgtgtttaaaattcgttgaaacagaagagataataaaacaggcgcaatatccgtgcaaatacacggaatacacctatctgtaatggattgcgtcattttaacaagatgtgtcaaactctaaagaagaaagttttatctttttagtcatccttgcaagaaagttcttccatcccgcgtttatcgggagttggaacaggtcggcgccgcccggccgggaaaatactgctttttcaataccctgctacacactctgcggccaaaggaatgcacgctttccgccttcaaaagtttttcggtggaacacagcctactgctccatcatgcccttaaggagcctcgaatcccgtctgtcaagatgccagaggcatatttaacatggcgcaaacatatcgtccgcccaaccggaattccatttttccggcatccgcagccataccggccttctccccggcaacagctacccctcccctctcagttctcctttttcaacatgaaatcccattcgcgagttgaaaggaaatatcatgaaaaaacagctattcttccccacgggaggtacgggaaaatacacttcctccccgtacttcctaataacaacatcacttcccgaaaatcatcaacaaggattttcctgttactgcacaaataagataaaggcttcgagccgcctttctctctgctctgctgcaccctccttccaatatactctttccatctctcccgtgaatgaactggttttctgaagccagcccttccaatactctcctgaatccgaatctcctgactgcctctcctcctcccagccagacacggaatgcaatactggaaaaaaacggcaacatttctcctgaagctccgttcccggacagaattcacggctatccgcccgccacctgcggtttcacaaaagggaaaaacggattcagaaccgggctatgaaaggagtattgctccagccaaaaccgcatatcccaaccagaacatttaccgtacaataaaaagggcatggtccggctccggatttctccacagggcttcccctccttgccgcaaaatgctgccgtatgcgggcgtccgtttctcccgtcaataacaaaaagcttccgctcctcttggggagcggaagctgagagtcaatgaaaaaaataagggtaatttatttttagtcgttcttaaggtcggtcagagccaccgttgtaatcccggcctccgtcaacgcgttcatgacgtcaataacgcgctggtggggaacatccccttccacccacaactgcactaccggcttggtgcctacagcgctggcctcctgttttttggcttccagctgctgcacgagcgtcgccaggttgtggttgttcatgtcattgtcgatcatcaggctgttgtccttaccccagtaaatagtaccgtccttgatgatgcggatcagcgccggctcaatctgggaggcgttttcgcccatggcttggcccggcatggacatatccagcttgcgttcctgaatcagggaagtcgccacaatgaagtaaatcaacagaaggaaacatacgtcgataagggaagaaatatccagcttgggatcttcatcctcgactgcctctagttttttatgtcttgccatagcgcgtaatgttattcagccttggttgcaggagaggaattcttggcaggcagaacggcaaaaatcactttgatgacaccgcattccgcagccacgcggattacctcccgggaccctttgaagagggcctgctggtcgccgcgcagataaaggcgcgtttcaaaatcctgcctgtccttgaagcgttccacaaggttcttgatatattccttgagttcgtcggaggaattgagcggggtgcctacgtcggaggaccagagaacgctgggatctacgccgggcggccgcttgcccgcgccttccccataaacattcaccacaatgcagccgttggcggatttcacttcaccggaactgctggccgtaggcatctggatgttcttatcctttttaacggtaatggccgtagcgttcaccacaaagaaaatcaacaggaggaaaaccatgtcgatcatgggggacatatccatttccccattttcttcttcaggcgctacattagcttttttcttacccataagctacatttcgttgaggttctccggcccggttccgacagagcggatgcttccgggccgggccgtctgttccggcaatcaggccaggccttcggggatgcgggcaagctgggcttcggcattcaccacgttgatggaggtgttcaccatttcctgcacagtgcccacgcattcggcaatctgggcgttggcaatgcccttctggaagaagaagaacggagtggcgataatagcgttgatcaatccccagaacgtcgtcagaagagccacggaaatgtcaccggccagctgggtggggtccgcctggccggcggtagccagcgtaccgaacgcgcccaccatcccctgcaccgtcccgaacaggccgagcatgggagaaatctgcgcgcaaagggccagcatgttgatccatttgaacacggcacggctttcattggccgtaaagtcggccacggcgtcttcaatagcatctttgccgaggtcttccggacgggtggcgtccacgttcggcagggcgtaggcaaccagacggcccaaataggtggggctgccggccgcaacttcaatggcggaccggatgcggcattcggccatcagctgcaacagagtgaccttgagatcttccgggcagaatttttcctttttcagggctaccatgttgtaaatcaccaggaaaatgatgaaagcttccaccagcataatcggaatcatggtccaaccaccggcgatgatccatttgtcaagcatggtctgttcctgcggggcaacggtttcggcggcttcctgagcgaaagcggatgtagaaaacgcagccatcaggacggaagcaaatgcaacgaaacggaaacccagtctaaaaaggttcttcataatttaagttatatggttgttcgaaaagatactggtgtattaaagcatgcaaattcagacttgcaagcatcattttagaccctgtaaaaaattcagacgccttcgcagccgctctcccgggccagccggctgcagatggggcagtgccccccgcatccccgcgcagggcaatattcacggccgtacaagacaatacgcagatgaagatctccccacgatttttcagggaaaaggcttttcaaatcgcgttccacggcttccaccgtttttcccgtgctcagcccccacagccgtgaaaggcggaaaatgtgggtatccaccggaaaggcgggaacgccaaaggcctgaaccatgacgacggaagcagttttatgccccacccccggaagagactccagagcagcaaagtcgcaaggaaccttccccctgtatttttccaccaggatgcggctgaggttcacgatggcggatgccttcctttccgagaggccgcagggcctcacaatttcccggaccgccgccacgtcctgacgggccatttcctccggggtggaagccagggcgaacaaagccggagtcaccagattcaccctcttgtccgtacactgggcagacaagagaaccgccaccagcagcgtgtaagcgtcgcgatgcaccaggggaatgggaggagccccgtacagggacatgagttcctcctggacaatggaagcccgtttttccgtattcatgccgccagattaccactccgcccgcacggcggaaaataaaaaagcgccgccatgcagcgatggcggcgccgggatgaaaaacatgggtcagtcggccttggcataaaaccccttggaaacgcggtgctgcagggccgcatacatggcgcggcagtgcctgtagccgcggcggctgccgagcacctccagactgttggcgggatctccccagcggacaatagtcagttccacataacggcggccccactccttcatcagctttttgttgggctggtaaatatcaatggttccggtgccgaccagggcgcttccgtaatcatcaacaacgtaaaggtagggctggcccttgatgcggaaagtagtccccaagggataaacggaccagtctgcagcggcgctgcggacggaagacgtgtatttcagcgccgtaccgacggcattccgggggccgtaggccaaatggtcgcgttcggaatgggtataagccgtggtgcgcactacgcgggtgcgctgggcgggatgataaaacggcatcttgtgcttgtcgcgccccaacttgggaagtttggaagaaggtgctgccgaacgactgggcgccaggggctggacgaatccctgggcagtttcacctacacgggccaaaacaagagcgtcactactggatttccccatgccggttacggctccgtttgtcgaacagctgctgacaaacatggccgcgacggcacaagacagggtggcaattattcttaaattcatgcggtacgaggttaggcgccatacacatggcagtcactccggcaaaaccttcaggccatgtgcggaagccggaaaatcggcaacggcggctcttgggtacgaaataatccccgccttggcaatcctttttttcccctcacccccttccgaacggggaaatttaattaatacaatttattgaaaataaataatatatgaaacatgccgcatttttgtcatatcatgacagataatatacttcccgaaatacttttttctatcacaccacgacacacttttttatttttatcatatttcatttataataaaaaatttacacgcatgaaaaatacacaatccctcaaaaatattccctgaaaaagttccaggggctgtactccgcaaaggcgtcatgagcaagaaaaacgcgtctcccgttgaacggatttccctttgccgttcaaggttccacgcgaatcctaatcgccccctttccatatctgcattttcacagcccttccatgcggcagaatgaagggctcaggaagaggttggtaagagcatactcttgtaagggaaaaccggaaaagtccggattctgtcgggcaatgttcccgccgcagaaacgcgctatgggaaaaaacgcgcaagcccggttgaaaaaagggctcctctcccttgccgctgtcttccaaattctggataacgctcatatcagaaaagcatgtccagccagagaaaaattttcccctccgtttagcggtatctaacgagggaagggagctcttatggaattttcttctttcccattcccttccgggcggctttccataagagtccccggcgtttcacccggcagacgggcacataccgaatgggctgttgcatccatccggaaatagattacactccggaacgaacatgcccgccggccttcctcaacacctcacgctggattatctgcgcgccctgctgtcccggggcgtggagaaaaccaccgtcacggaggaagccagaatggtcctgagaaaatgggtcatggacgcgcgccggatatccggaagccccctcccctcttccgtttacgccaagcctgccgcagatgaaacacggccgcaacagcccaccccggagcagacgcctccagattccgtggatgaagcatccttcggcaatgaactccgggatatcctcaatggagtacagcctcacagaacggaggaggaagctctggtgccccgccatatttcctttgatctggaaggtgaaacggaggaagaaaaactgtcctccctgcgggagctggtcgttaactggccgccgctccggaacatggattccttgagggagacgcccgtgttttcctccggcaatcccagggcggacatcatgatggtaacggacgcccccggcctgtatgaagaaaaacagggggttcccctggccgggccttccggacaaaagctggacgccatgctgaaagccatggggctttcccgttccgatatttatctgacccatctggtcaaataccgcccggccctccccaggcagcttaccaacaaccgcccgcctacagaccgggagatagaaatttccctgcccattctccgggaggaaatcatgctggtgcgcccgaaagtagtggtagccctgggagccatcgcagcccgcggcatcctccagtcaggagagacgcctctttccgccctgagaggcatcttccacacagctttcaacacgcccgtgcgcgttacttataatcccagttatcttctccgcacggaagatatttcagaaaagcgaaaggtttgggaggatatgctgtgtgtcatggaacaggcaggtctgcccatctctgaaaaacaacgttcctacttcctgcccaaaaagtaatatatggattatttaaacagtattctggggcgcaaacgcgccgatttgaaaaaacttcttcccctggaagggaaattacgggcctccgccatccagcggaatgattacgcgggattccgcaccgcggtggaccttggggaaacccgcctctccgtagttccggaaatatccagggtgcatcccgccctccgcctccaggaaggagtacaggatatccggcacatgtacggcatgttcctccagggcggagcgcagggcatttccatcgctgtggaaccggaagtatacggcgggtcatgggacatggtttccactgtttccagaatcagttccattcccgtcatggcgcgcgacgtgttcattcatcccgccatgatctgccaggccatcgtctcgggagcggatgccgtcaacctggtggcggccgccctgccggcaaaggatttgtcggagctgtaccgcatggcttccgggctgggactggacgtaatgatggaggtccataccctgaaggagcttgaaaccgtcatggacctggaagcggaattcatctgcatcaacaatgcagacccgcacactctccaggccaatcctgcagtcacggagaaactcattgaagaaatacccgcctccgtcactgtcctgtccgcagggggcatccgcaccgtggaagacgcgcgccgcatgctggacgcaggagccaatggcgttcttctccaagacgaacttgcccgcatggatattccccaggatttcatggaggccattctggctctccgggcggactgattttccccttactatattataatagaaaagacatctgcatccgcacgcatggggaaatgcaggattggagaaattgctccgccactgccggcaggactccgtgacctgggttccatatcctccgcgttttcatcccgcctttccctgtattttcatgaaacgtacaaatccttcgccccgaatgccccgcggatatgccgggattccgggggcttcccttccctgtacaggacttccacaacatcgtagcggaaattcaccggttccggaagcaggcgaagccattccgccgctccccggcgtatcagagcccttttgcgggcattcacagcgcgtcgggcacctccataaccattccccgtacgggttttcacctccacaaaaaccaggcactccccttcccggcacaccatgtccagctctccgcctctgacgggacgccaatttctcctcaggataacgcacccttccgcacgcaggaaggaggccgcagccagttccccgtacattcccagccatgccgtatcccgcttacccctgctcagggatggacagttccatttgtgaaaccggcgcaaacgagcggcgatggagcggacagggcccatgcctccgcagagcttccatatgggctttcgtaccatatcctttgtgttttgcaaaaccgtactgcgggtaggaagcgtccgcttccgtcatcatgcggtccctcgtcaccttggccagaacgctggcggcagctatggaaaggctcctgccgtccccctttacaatggcgcggtgcggcacaggaagccccttgacaggcaatccatccaccaggcagaaatctgcacgcagggccagaccttccaccgcacgcgccatcgccagatgagtggctctcaaaatgttgaaccggtctatttcttccacggaagccactcctacggaacacaccgcctgttcacactccagaagagccagaaacaggcgttccctttttgccgcggtcaactgcttggaatcgttcaaaccggttaattcctccgccagaacaggcaaaataacagcgccggctaccacgggaccggccaatggcccgcgcccggcctcatctactccagccacgcaaagaaaaccggaggcccgggcctccatctcaaaactcatatccggatgcggtttttccttcatggcgctattcctcctcctgttcctccggaaggcgggccagcagaatctgcgtgattcttctgccgtcagaccccgtcaccacagcccggtagcggccaatccgcaattcctccccttcttccggaatataacccatccggctgattacgtaaccgcccagcgtagtaacgcccggacaatccaaatccatttcaggcaggtaatcagccaggtcaaacagggtaatagccccattgacggcatatgtatccttgccggttttcacaaactcccgcatttcctcctggtcaaattcgtcctgaatgtcatcccctacaatctgttccagcacatcatccaggaataccaggccgatagaatcaccgaattcatccactaccagggcaaagtgggcatgttctttcagaaagaacgtgagaagactgtccaggggcatcgtatccggcaccacgcgcaattcacgccgaacgctcctcaaatccggattttcccgtcctaccagtttgagcagatccttgacatgcacccagcccttcacttcatccaggtggtctccttccaccagcggaaaccgggtgtggcgggatttccgggcaagctcccagttttcctcaaagggggccgtcaaatccatcacatccacttcagagcgcggggtcattacgtccttgacgcacatatcgttcagttcaagggcatttttggaaatttccgcctcctgcttcgtcagctcgcgggaacgttcgctttcttccaccagatacatcaattcatccgtgctgtgcaccgtgcacgccgtggagcggggatctatgcccagcaggtatttcagcacaaaccgcgccattccgcccgtcaggccaagaatacccgtatatctgaacaccgtataaaagaaatacagcaggggaaccgtcgccagggcggccttgtccggatggcgcatcgccatagccttggggataaactccccaaataccacctggcagcaggcaaagaaaacaaacgtaacggccagagcgattccgtaaacggaaaccatgcctcccagccccagggaaatcagaaagggagctgtcagttccgatacaaaaaacgttcccaggaatcccagcgccagggaagaaaaagtaatgcccgcctgacaggcagccaaataaagatcgggatgtttggccgccttccgcgcccgggccagttttttccgggttcgggccggaacgccttccccggcgtgcagctggctttcgcgaaccttcatcaaggcgaattcgctcgccgcaaaaaacgcattcaacagtaaaaaaagaacaaaaccggcaactgccagcattatcccatccagcgcagggcctgaaccgggcgcttcagcggccccgaaggccgcaagaatactcagaggatccggatcattcattctgattcaaataacatattcggataagatggcagagatattgcccggcacttgtcatcacagtttttcataaactcccttatcccggcgctccagcacggtgaatccggcagccttggcgtctgaaacggaaagaggcttggttatctccggcacattaacgcggctgatgaccttacgcacgggatgcttgcacaccaggcatttttcaagcggagcacgatccacgggacgcctcaactcaaaaccgcggcggcacaccggacaggactgtccggggtcgtcagggttttcagaaatatactcgtatatgggcatagcaaaacgctaggctaaataaaaatcagcctagcgtcaaaatctttataaggctgcaaccttttcctctccttaccagctggacttggtcacaccgggaatcatgccggcattggccagttcacggaaggaaatacgggaaagcttgaaacggcggataaatgcacggcggcggccggaaacaaggcagcggttgaccgtacgggtcgggcttgcattgcggggcagcatggttaaaccgatataatccttctcagccttcaattgcgcacgcagttctgcatagcgcttgacggtttcagcctttttcttgtctcttgcgatccagctcttcttagccataagttcggcggaataagtagagggacggggatgaaaaatcaagcgctttttttcgattttatcaaattcaagttgttttcaatgtcatccggcctttccggcggtctttgcgcacggaattgaatacctgtttctttcacaaatatatcgcgtgaggaggcatccggaacgttcgcaacaggatggaagaagccgatttatttaactcttcctaaccattatctccaacaccccatgggagcatatctggaaggagtccatgcaaaacacgccgaccctctgagcacgaaggacattttctgattttagaaatatcccaacaaataaggtgatcatgataaagatccgcaccttggaggcgctgcttgcgcaggcatgggcgagtgtatcatcccggcatttgaaagcggaagccggacagggatatctgccgtaaaaaaacggcccttccctccggcgcctgcaaggaagaatgagaaaaaacatggagggctctacatacacgcgccgcctgtttccaatccattgagggatcaacattcttcatcaggaaggacacggccgggaactggaccattcacgcagactggcggcggaaccgttcgccgggtatgcctcaacagaaaatttccgtgggagtatgaagaggaacgcaagatgcggttacctctgtagaggaaagcacccgtttcattcctgttccggatgatggctgaatcatttgccggagacatgaacaaaacccggaagaaggcaagatatgcaacgttctgcatggaacactattttccaatgagttccggcagcaattcccagtaaaactccggaaaaagctgtggaagaaatgagcgttgcttttcccggaaaggccggttcacctccgctcggaaccgtttcatcaaagcagtctccggatactccggggaaaagcctgcggcgaaacatgattttgtcctttcctccggggggggaatggggcatcatgtcgccgcacactaatcattgacgtacatgaaaatcgtagttgcatactctggcggccttgacacctccgttcttttgaagtggctcaaggaaaaatataatgccgaaatcatcgcctactgcgcagacgtaggccaggcggaagaactggacggactggaagccaaagccctggcgacgggcgcctccaagtgcttcatcggcgacctcaaggaagacttcgccaccaactacatcttcccgatgatgcaggccaatgccctttacgaaggccgctacctgctggggacatccatcgcccgtccctgcatttccaaagacatggtggatctggccattcgggaaggcgcggacgccatcgcccacggcgccaccggcaaggggaacgaccaggtccgctttgaactggccgtcaatgccctggccccgaatatcaaggtcatcgccccgtggcgtgatcccgaattccgccagcagttcccgggccgcacggaaatgatcgcctacgcggaatcccacggcatcccgatccggcagtctctgaaaaagccttattccatggaccgcaacctgcttcacatttcctttgaagccgggatgctggaagatacctggtatgacggcaccacccccgccgaccgtgaaatgtacaagctttccgtttccccggaagacgctccggaccaggccgaatacatccagctcctgtatgaaaagggcaatgtcatcggcatccagtacgatggccttgacgctctgctgaaagaactgggcgtcaccccgaaaggagaacgcgacgggtataccctgctcagccccctgggcgtcatgtacgtgctgaacgctctgggcggcaagcatggtatcggccgcgtggatatcgtggaaaaccgctttgtgggcatgaagagccgcggcatttatgaaactcccggcggcaccatcctgctggcggcccaccgcgatattgaaacaattacaatcgaccgggaagtgcagaaggtgcgcgactccctcatcccggaatacgccacgctggtttacaacggcttctggtttgcgccggaacgcgaggccatccaggccctggtgaccaaatcccaggaaaccgtcaacggggaagtacgcctgaagctttacaagggtaacgtcatgtacgccggacgccgttcccctcagtccctgtattccgaagaaatcgccacgatggaaggcggccacgaggaactgtacaaccagaacgacgcggaagggttcatccacctcaacggattgcgcctgaagcaattcagccgcgtcaataaaccctacggcaattaagcacccgtaacggcgccgctctttatcaaaccgtccggaaaaggtattccggacggttttttctttgcaataaccttttcctttcctgcgtagtaaccgttatgggatttctttcacacgcatttctggcggctgcattttcgctctccccgtttttggcatccgccacggccttcaaacccaatatcatttttatttatgcggatgacctgggcatgggcatgctgggctgctatggccagaaaatcgtgaaaacacccaatatcgaccgcctggccagccagggcatcatgttcacccggtgctacagcagccaatattgctgcccggcgcgcgcttccctgcttatgggcgtgcacgacagccactcccattcctacacccagacagcgggagccctggtcatcacggcggaacgggaaggctggtccaatgagcaactggaagagaaagcggcacgggcagcacgcatcaaggccgccgagggagaagtgttcctcccggaattgctgaaaaaggccggatatgtcacgggacagttcggcaagctggaatggggattcaccacctggcacggagaattgaaaagacacggctgggaccgctatgtagggtacatggaccatcagagggcccatggcttttatccctccttcctctggaaagacggcgaacgcctccccctgaaaggcaacacccatgccgacggaggcaaaactccggaagactacagtccgggagccacagaaaaacgaagaggcaacagggaaggcaaagtcacctacgctccggacgtgatgctggcggaaacccttcgtttcatggaggaaaaccggaataggcccatgtttatctttttttccaccaaccttccccacggcccggtagatattcctccggaagaaaacacgtacgcgggctcccctgccatccgccaggcctatggcaatgccagcggaaccaacagggaatgctccggagcggcagaagaatacgcttccatggtggacaagctggacaggcaggtcggagccatcgtggaccaggtgcgcaagctgggcctggacaagcgcaccattatcattttcagttccgacaacgggcatgaactttactaccgtacggataaaggccgcggccgcgggcccgactgccacggaggcgtcctggacggcaccggggaactgctggatgttttccgcggcagccgcggccgcgttgggccaaacaacgccatggccaatctggccggcctgaaatggaccagccatgaagggggcatccgcgttccccttatcatttcctggcccggcacgctgccccatggaaaggtctgccacagcctggtggccaattacgaccatatggcctctttcgccgatcttgcggggatccgcatgccggaaggcaaagatgccgtttcctatatggatatactgtccggcaactccgccaggcagcgcgattatgtagtcgtggatcacaccgtcatcacgggagacggctggaagcttacgcaaaaacaaaataaaccgttcctctttcacataggcagggatcctgaagaaaggaataatcttgcgggaacaaggaaagaccagctggaaaaactccgggccatttacaggaaggaagtgggcagccccagaaaagacaggtgaaaaccggaaccgacccggcgtccccctttttccgccgggcgtttttgcaggttgaaacctgaacgttccgcatgtagagttccccggtgaagaacaatcccccctccccccgccagacagcactgaattgcctgaggagctggcatgcaggccgctcctttgcggaaaccctcgtggaccgggaatgttcacgagctgcgcttccaccggcagacaggcacctggtgcaggctttggtcttcagcgtattgcgcaaccagacctggctgaaccacgtcatcggaaccctcaggaaaggcaagctggacgtggaagcgcgtcttattctccaactggggttgagccagcttttcctgctgggcatggcggaccacgccgctgtgtatgaaaccgtgaatctcgcgtccgtacgcctgagaggactggtaaacgctatcctgcgcaacgctttgcggcgggagaaaaccattctggaggaccgggaaaaacttccgctttccattcattattccacccccgcatggctggtacggagatggatggaacaaatggggccgcaaatgacccgcgacctgctccgctggaacaataccacgccgcgcctgtatgtgcgcgccaatcctttgatacccatgaaaaatattccggcctccctcgcaccgctggaccgcgcgcccggctggttctccgtggaaggccttctgccgctggaggaaattaaaacaggctccctttacgtggcggacccttccacccgttattccattgatttgctggccccccagcccggagaggagattctggacgcctgcgccgcccccggcggcaaatccgcagccatcatcgccgctaccagaggcaaagccctcctgaccgccacggatctccatgaacaccggctgcccaccctgaaggaaaacctggacaggcagggatcccccttcgtcaggacggcgcaggcggactggtcccttccctgccgcacggaatggaagggccgctttgacgccgtgcttctggacgttccctgttccaacaccggagtcatccaacgccgcgtggatgtgcgctggcgcctgactccggaggaaatccgccgcctggccgcgctccagaagaccatcctggaaaatgcctcccacgccgtcaagccgggcggcagactggtttattccacctgttccattgacgcggaggaagacgggctgctggtcagggtctttctgcagaaccatccggaatggacgctgaaagaagaaaaacttatccttccccacgaggaaaaatcggacggagcgtatgcggcccttttgatctgtgcttgacctcggcttcaatttgtcaacaatgcgtgttcctgattaatatcattccattatgtcccgcaaacccatcattgccgccaactggaagatgaacatcggccccgctgaaggcgcccagttcatcgaaagcttcaaaaaccttattaacgggaaagacgtctcgtgcgacgtagtcatcatccctcctttcaccaccattccctccgtgcagaacgccctgggcggttgctcctgcatcgccgccggagcccagaacgtctcccagtacgacaacggagcctacactggggaaatctccaccagcatgctgaatgaactggggctcaagtatgtggtgctcggccacagcgaacgccgccaatatttcggagaaacggatgccatcatcaacgccaaaatcaagaaggccatcgccgcaggcattacccccattttctgcatcggcgaaacgaaggacgaacgcctgggaggcattttggaacctgtgctggaaatccagctcaagggcggcctcaaggatctcaccccggaggaggtatccaacctggtcatcgcctatgaacccgtctgggccatcggcaccggcctgaccgcaacttccaaggaagctcaggaagcccattcttttatccgcaaggttatttccgacgtcttcggagcagacgccgccgccaaggtgcgcatccagtacggcggctccgtaaaaccggaaaatgtggaggaactcatggcccagccggacattgacggggctctggtgggcggcgcttccctgaagccggaatccttcgctgctctggtaacttccgccaaataagcggaatccggcgccaccctttctacaggccggtccttcacgggaccggcctttttcatctccggagcaccggcctcgctcttttcacccaagagcgcagtttctgccttttcaagcggcctaaatcgtgcataatggcgggaaatcatgaaaacccgcttacttaccccacgcagcaaaggtttcacgctcattgaagttctcgtagtcatcgccatcattgccctgctggcaggcgtctcctacagcatttattcccatgccacggaaacggcggccaggacacgctgcacggacaacctgcgccgcattagcgactggggcaaggaattcgcaggccagaacggcgggaaactgccctccagcggcatgaaagacagcctcctgagcgccagggaatgccggaactggtgggacgcactggcgcccatcgttaatgcggaacaacccgacttgatcgcccggaacgccaaggaacccaacatgctcccggacacgttccgctgcaaaaacgacaagcgtccggaaatccttggagcggaggatgccaaccttcccgccgggccgaacaccatttcctacaccagctggctggacaaccggaagggacgtcccatgaatgtggcgcgcggtcaggccctgcggggcaaaccctggatcagcgacggcatcccgattgacgggcgcagcgtcatcacggaacaggattttgaggaaatcgtagtcccggcccttgaacgccaccagggaggaatcatggtgctttatgcggacggaaaaatatcccccgttgaggaccctacgcttaacaaagtcacccaaggttcctgaaccccttgtttctccgcccggcgcgggagggaagctgccggaccattgccggcaatccagtggaattttcttcccactcccactgattcgcctttacgaaaccgggataatcattaaggttagcgtccagatgaatcagcatgctcccttcctgcatccgtacgatggaatgataccactgtctgtggcggggtatatcctgggaaccgttctgctgctggcccacctgtatgcgctggtaaaaaggcatcaggtgcaggcttttctgctggcgtctccgcgcaaccacctgctggctcagattctgctggccggcggcctgttctggttctttctgctggtggctcccgaaggattgggcgtgctgagccgctttcgggtggggctggcggaatttgaaggtatccgctggctgctccagctggcatgccccgtctttctggtgctgatggtcacgcaggtgaaaaacctgctctttccacgggcgctgggcatcttcggcctgatggtggcggctcccctcctcagtgccgccttccttcaggagccagtgaccaggctccttattcccatctggtgttacatcgtcattttcctttcgattctctggataggcaagccctacctgtaccgcgacatggtcaataaaatatgctccaagcctgcttggtggacgcctctttgcctgggaggaatggcctatggagccgccattctgctttgcgccatcctgtggtggtagagaggccgccccttccggcacgcttcatcacgcagaaaagacattcagccgcaggagaaagcctccggcaaaaacaggcatacgcaggacggatttttccggaacggcctgttttttcctcctgctgcaagaatcaatagcggttccgcttattatatatgatattccatattcctttcatgtgctctaccctgcgttcctccatcctggccagcatagccttctggctgcttacccttgccccctcactggcggacaggcccaatatcgtccttatcctggctgatgacatgggatggtccgacccgggctgctacggttcggaaatacccactccagccctggatactctggccagacaggggatgctggcaacccggctctacaccgcttcccgctgttcaccctcccgggcctccatcatgaccggctgcgaacctcacaaggtggacgtagggctcctggatgacgacagcgggcaccccggctaccgcggacgcctgaacccggatatccccaccctgccggaacttctgaaaaaagcgggataccgtacctacctttccgggaaatggcatcttggaaaagttcagggagcctatccatgggatcgcggcttcgaccgttcccgcggtttgctgggtggagcggcagattactacaggcccatgccggacagacccttcggtgaaaacgggaaactgctccgtccggaggatctgccggaggatttttacatgacggacgatatcaccaaaacggctctggcctatattgacgatgccgccaaaagcaggcagcccttcttcctttacgtggcttatacggctccgcatacacccctccaggccccccggagggaaatagaaaaaatgctcccgttctacaacggcaaatccccccatgccatcgcttccaaaagactggaaaaacaaaagctgctgggaatcgtccctcctacagccaaactgggcatggccggcaaattcaatccagaaggctatggaaaaacttccgcaaagcggaaggattatattgccgaatgcatggccgcctacgccgctcaaatcgctatcatggaccgcggcataggccgcattctcgcgtccctggaacgtcaccgcctcagtgacaatactatcgtcatgtttttatcagacaatggcgcaacagcggaaataccccagaacaataaaaacaagaagactaccctccccacaggcccactgggagaagtcggatgcagggacggatacggccccatgtgggcggctgtgtccaataccccttaccgccagtataaaatagaaacctttgacggagggctgtccgcccccttcatcattcgctacccttccaaaatacgtccggaatcgcgctaccactcgcctttcctgctccaggacatcgccccaacctgccttgcgtgggccgctctcccaattccggcccatatggacggcaagccgctcaacacctactggaataatcctccgaaacttcctccgtccaaggtgtgggacttcattcccaatacctgccctccccgcactatcttctgggaacatcagagaaaccgggcggccctgacaagtcaattcaagctggtggcccccaaccgaggcccttggcaggtgtacgacatcagggacaggacggaacagaaaaatctggcatccaggtaccagacgcttgtagaacaattgtccgcgcagtacaggaaatgggcggcggaaaaccatgccgaatgacacggcacggcaggaaaacgggcatacgcgccctaaacgtttctatgggaatccccttccggaagaaaattctgatttccgtttcctcaagtaacggaaaacggcacgtgattcaccgggaaagaaaaagcagggaataacagttattcccgtccgcggcaacattcctgcctcccgggcattccgggaaccattcattattttcacactccttgccatcctttcccatgaaggggaattgcataaaaatccgcttcttcattaggatttttcctatgccctattttttgccctgtaatcaaaaataattcctttataaggttaaaactagacaaaacaccgctgtttaccaaatcatttcccaaaaggaaaactcttcttttttcctaacaattattggaataaaagaatccttatcattcaaagaaatatcgtattagaatacttctaaattagcaaaaaactcattgattgtaaataaacttaatttaaaatgccataagaaaaaacctttctgcaccttacctccgttctgtactgccgtcacaccagatatggaatatttttgataatcaattcataacacacctttaacaaaacttgcacagcgtctttttatgttcaaagagccctctttcctcaaaaaagcaaatctgttccagcctattctggttgtcgtgatctccatcatcggagggactcccatggaaggagccaatacggggaaaatagtccttttgatcattctgggcgccgctttcattgtatggcatgtggaatgccagagactgctcaacaggaaccgggaaaccagggagcatgcctgcgccctgaaaaaccgcagtgcggctctttacaaaaaaacttacgccgccctgagcggagaatacgaaaacttcgccaataaactgaatggagaaagttgccgggaggcaaaaacggacggttcaagggggacgacggaaagcttcaacggggcctgcctgttcctgtgctccaccattgccgctgcgctggctgaatataaaaactcccttgtctttgaagtgctttatattcaggcagatcggcggaaagaccaaaccttgctgcacgttacaggctacgcacagggagaacacaataacgacaccccttccctgctggcacagcctccgcggcccgtaacgaaaacacccgccatgctggatgaacaattattcgcggaacgccacctcagccccctggttctttccaacccggaagaagtgcagcgcagctttttccggaagcgcaaccagcctccggaggaaaaatacatgcagtatctggccattcccgtcctgagcaagagaaatgaaatcatcgggcttatcgaaatcgccgttaaaaagaatccgttcatttcgcccgtcaccatgctggaagctcatgaattggccgacgttaaatcatggctgtaccatttaaaggaccatttcctgttgtttcatgaaatagaacgcgccgtccgggatggattcccatgacggcagtacggacagaatagcctgctacgcccggcgccatattccttaaaaatttcctggaatatatattctggcatatttacaatcaactacttctatctttttaaccagaacggttaccgccatataatgctattaacctgtaagtgaaacagatagcacttgggtcattttctgcatctgaaacaagaaagaaaaaaccctgtaaactattgggtctacagggtttcaaaaaaggaatggtacttggaccgggactcgaacccgggaccaatagattaaaagtctactgctctaccaactgagctacccaagcacttacccttgctggaagggcgcaagcagtaaacaccacaccccctttcatggcaagcgtaaaatggaagatggacaaaaaaagatcaggattccatgcattccagccatctcgcacgccattcggcaggaatacgcgcagggcggccctgcggcatctggatcaaggccagctgctgatgagccctgaccagaagatcattattggaagcgcgccgcatttcaaaatcgcaccagaaacgggcccggtccacggattgaagccatcccgtcgtcaaaatggtgtctcccagaacggccggacgcacatagtcaatctcatggcgcaccaccacggcaaactgctgcaaatcgctcatggttttgtaatccattcccaatttagcgccaagtttggtacggcaggcctcaatcatgcgcaaataggccaagttatggactactccgccacagtccgtatcataaaacatgacttcatcttccgtatgaaacatcagctccggattcatgcctgccattgtaaaaaggaaacaggcgggctgaaaggaaattccggttcagccgcgccatgcatgatgcgtccgcgccagcgtcagcacgcaaacggaagcagccccggcgcggaggagcagacgggcgcaggaatctgccgtggctccggtcgtaaaaacatcatccaccagcagcacatccctgcccctgacggagctgcgtttcatccttttttcatccgctgcataaattttacgggcatgtctgagccgctgctcccgcgacaagctggcctggggaagcgtatccggcaggcgtttcagcacgccggcatacggccagcccagttcctctcccagtaaaaccgccagttcctgcgcctggttgtacccccttcgagcctgtttgccgcggtgcatgggcacgggaacgagcaggcgttttttcccgccgaaccagtgaggatttccacgcactgcctctgccatcatctgcgcgaaggagccggccagatgaacagctcccccatatttgaaagccagcagaagatcccgcaatgatcccgtattcacatacacggcacgggcttcctcaaaagaggggagaaacgccgcgcagcggcggcataatccggacgggatgcaggaaccctccgccggttccccgcagacggcacaaaagggaggctcgacaggcacgaaacttccgcggcagtccgggcagacatggcagccatccaggccgccgcgcccgcacaactcgcagacaaaaggatacacccaggaaagccattccctggcaaccgccctcagcattccccgcacggcagaaagttgaaagaggctcctatcgtccgtctctcccatcggggaagtcggcgtcctcctcttccggcatctcttccagaagcttgtctatggtttcaatgaaacgccatgggcaccgcttgcgctggtatttacgccacagcacatcgcgcagagtcacccagtgagcccgcgtcaattccacacgttcccattccacatcgtcacgttccgcacggcccaccttgggggcgcactccagcttccatttgccggcatggtggcacgccctgtacaccagggttccctcttccgtgcgttctttccacgtgtgaacttccatggaggcgagtgtaaggaagaagcgttccgggtaaagaggaatttttctagtcatccgtccttgcgcgattaatatggctccgtcatgaacgacactgaaatgatcgaatgccgcgagcctgcccttcaaatgcagcgcctcatcgccatcatgaaacgtctgcgcgccccccacggctgcccctgggacgcggaacaaacccaccattccctgatttccaatatgattgaggaagcctatgaagtcgtggacaccattcagcggaatgactggacgcagctgagggaagaattgggcgatgttttgcttcaagtggtttttcatgcggagattgcccaggaagcagggcgtttcgatttcaatgacgtggctgcggaagtaagcgaaaaactcgtccgccgccatccccatgtatttgcccagtccaaggcggacacgacggatgccgtattggcacagtgggacaagatcaaacgccgggaaaagggagcggaaacaaccccgtacctgcatggaacaggcaaggggctgcctcccatgctccaggcatggaagctccagaaaaaagccgccaaagtaggatttgactggacggacgcccaaggcgcccttgacaaggtgaaggaagaaaccgcggaatgcggggaaattctttccgcgccggaggaagacccacgcgtcgcggaggaattgggagatcttctgttttccgtagtcaacctgtgcaggaaaaagggaatcgacccggaaacggccatggccggagcaaacagaaagtttgagcggcgtttcaacgaaatggaacggctgcttgccaaagacggcctttctctggaagaagcctctgcggacgccatggaggaacgctggcagcaggcgaaatccgcccggtaacgaaaaccggggtcaggccatcatgtccatgttcgggtctttccaggccggatcatatcccctggcatagctgaacacatgcttgtgcatgtattcgaagtactgctccttctgcatgggggtgagccgttcccagatggctacgttcaaggcgcggcacaccttctgcatcattttcagggtaagctggcgcccctgccgggctttttgaacctgtttgtgggtaagctgctccggagaaatctccaccagatcgtgattggtcagatgccagcgtttcatcagttcatccaaaggctgttctccgtggttgcgtccggttgctgtggcttcctcgtccatacacctctcttcgtgccttatttccgggaaataggcaatacatgattgccccatcagcactttttttgcatttccagttgcccggcgtccggatacatggttcaatcccgccccgttgcaataagatgattagcgagaaagaggaattactggaatggcgcaaacgcgccgccgcacagcccgcgggacgggtagtcctggatctggaggcagacagcctgcaccgctatcaggaaaaaatctgcctgatccaatacgcggatgaaacgggttcctgcctgatcgaccctctctccatcgaagacatggggcctttctacaactggctgaaggaaacggaagtctggatgcacggcgcggactacgacatgagcctctttcaacacgcctgggaaacgttgcccgccatgatctgggatacgcagacggcggcgcgcctgctgggattccgccagttcggactggccgccctggtggaacacttctacggcatcaccctgagcaaatcctcccaaaaggcggactgggcgcggcgccccctttccccgaccatggtcacctacgccctgaacgacgtaaattacatgctggacatggcggacaaactgacggccgccctacgggaaaaaggccgcatgggctggtttgaagaaatttgcagacactccatggaacgcgcccgggaacgccatctggccggacatcaggacccctggcgtatccagggctgcggaaaactgaacaggaaagggctggccgccctgcgggaaatgtggacctggcgcgatgcggaagccaaaacatgggacaagcccgcattcatggtttgctccaatgctgacctcatccagtggagcgtggctcttcaggagcagcgcaccgtggctcctccgccccgttttcatgcccataggcgcaaccggttcatgaatgcgctccaaaaattctacctgctggatgaagaggactacccatgccggccccgcatccagcgccggcagcattccgaacagtttgaagacaatctggcccgcctgtgcaaactcagggatgaaaaagctgaagagctgggcatggaaggctccttcctgattacccgggcctctctggaagccattgcggaagacagggaaaaaggcgtttccaccctgttgaactggcagagggaagccctgggtttttaagcggttctttttgcaacggcaaaatacccgccccccagccgcccagcatcatttgtccttcattatggacggccaatacaagccttctctctggccattcccggctttctgaaggctttctccgctcagggcagacaggaacagaaattcttcccccgcaaacgccgtcttcccctgcctgtttatttacattgaacggaagacagttttttctataatgcagggcagttcccttcctccatgccctccaaccgccattcatacatggtcctggcaatcttctgcgtctgcgcccttgccatatgcgccttcctttcttggcggaaccaggagaaaaaagaccggctgtcgcggcagtacgcggaattttccatgccccagacctcgaagggaagcacgccgacacaacagaaagccctgcttgaaatacttagcagagaacagaaaaatatttctcagacttccccgaaccgtcaacagacggcagcaccgccgccccggagccgagaaaaaatcttttccctcccggcagggcatgctagggtggcaggcgatgaatcatgccgatttagaccagttgctgatccttcaggaaaaggatgtgcggatttccaaactccggaaggagctggcttccctgccggaacagagaacgcgcctgctgaagcagatggaggccatcaagcagaaggccctggccgccaaacaggaagtggcaggcattgaaaaaagcatacgggacgtggaggccgccgttgaaaccaaacgcgcctacatcggcaaaatgaaaaccctccagtccaacacccggaaaaacgaggaataccagaggtgcatccaggaggtggaaaaaacggaagccgctattgactctctggaaacctcagagctggaattgatggagcgcctggaaacagcaaaaacggacatggagcagaaaatccgccgtgcacgggacgcccagcacgaactggaggaaacgctcgcgcgctttgaccggacggcagagacggacaaggagctcctgaaccgtttgaatgcggaacgcgcggatctggccgccgccgttccggaagattccctgggggaatatgaacggatgaccagaagcaagggtgttccggtcattgtgcccatggatgaaaaaggccattgcggcggctgccacatggttatcacggacaacacccgaatgaaagtgctgggcggccacgaaaccgtttactgcgacagttgccaccgcatcctccactgaaggagtttccaggaacgccgccgggcttgccatgaaatccagatcggaagaatttgaagagtgggggacggaagtcatcttcggccgtgccaagggattccgcgccgccatgatgcgcgtggtcctgcgcggtgcctcctggctgttcaggctggtggttctggcacggctgtatctgtttcattccagcatcgccaggcaggccaggctgggaatgctggtggtcagcgtgggcaacatcactgtgggaggaaccggaaaaaccccggtggtggaactgctggcccgcaccctcaccctccgcggccgtaaagtagccatcctgacacgcggctacaaaagcgcagagctggataagcctcaggaatggagagacaaggacggcaggctgccggagaatcttcccaagatcgccagcgacggaaaaacgcgctacctgagccccctgtattccggtgatgaacctttcatgctcgccaaaaatctggacggagtggcggtgctggtggataaaaaccgcatcaagtccggcatcttcgccattgagcacctggggtgcgacaccctgttgctggacgacggcatgcaatatttgaagctggcgcatgaactggatatcgtgctggtggattgcggcgcgccttttggcaccggagccatgctcccgcgcggcaccctgcgggaacccaggagcagtttggcgcgcgccagctacatcattctgaccaaatgcggcgggaaaccacaggatgagctgatctccgccatcaggaagtacaatcccgtggcggacatcatcgtgagtgaccacggcccccggtatctggaaaatgtgttcacgggggaacgccttcctctgaaggccctccgggggaaatgggtggcgtgcctcagcggcatcgcgcgcccggaaagttttgaaaactccctgcgctccctgggcgcccacgtggaaatctgccgcaggtttccagaccaccactggtttgaacaaacggaattgcaggaattttacgaccgctgcgcagaccgggccatggacatgatcgtaactacggagaaggatgccgtgcggctggaaaaaccggaggaagacccggaggtccctatctatttcctgcgtattgaagtggaaatctaccagggccgggaggcatgggaacgttgtgtggaccgcatctgcggaatttcagaaccgcgcccacgggatgaatggcaaccttcctcatctttctgagcaagagcgcagcagcttgaggcaatacatcaagaaaatcgtgaacatgcgttgcactttttcttgaaaagaagtatctaaaatgttccagaaatgagcatcaaaaaattaaaaccattcatcacagcggtcggcgtcatgcttctgctcgcggcagttacaatgggttatttttccgctcaaaggctgtcttccatcattccggcgtccggttacgaagataaaggcgtttattccttcgtacctgtccgggtgcttcctgttcaagtggaaaataccggcgcaaccggaagagcccgccgcatgaaccccaccaaaaccgtttacatggtccactaccgtgataccggcagaaaaggctatcagtggaaattccaagcggctacccatgaaacgggacaaaaaatcgtgaatcagagaatcgccgtagagcggcgcgtgctgagcatccctgccgacaaccattcctatatcaccatagaatcggaagagactgcagaaagctatacagcagaacttcggcaaaagaatataatgatcctgaccttctcaggaatctacattctgctctatgcggcaacatggggcgtcattcttatgaaaaggtccaggaaagagtcccccgcggcctgaaatgaaaaaggcagtttccccgaaaatgcggtctttacgcccttctgacggaaacgcggcagaaccttgacggcgaacggcatgaagccaatcgcacatttattggaatctcccggcgggtatgccactccataagcgaagaatcccgctttttcattgtcgccgttcacatcctgtcatgaccgcctgcgtgcggaaagaatgacatttcccgaaagtctgcggaaatccgccgcttttatgcagagaaggccgcttgacttgcccggaaaatcgtgtgaaacaaaaaggcagtattttcccatgaaggcatttaccatcacctccattctggctgctgcgtgcctgtttccgtcctattcgccggccggagccgcagcagaaaacaagattcaggctgcctcaatgcaaacggcggcaggcattcccaagcaggacccccagcttatcaaggggaaactcgccaacggcctgacctacttcatccgcccgaatgcggaacccaagggccggttcagcatccgcctgcgcgtcaacacgggttctctgaatgaaacggatgatatccagggcgtttcccacttcctggaacacatggttttcaacggaagcacccatttcaagcgcggggaaatgattcccgccatgcagaaagaaggcctgggcctgggaggggacgcaaatgcgtacaccgcctttgacgaaaccgtgtacatgatggacgtgcccagcatgaaggaatccaccgtggacctggctttcaccatcatgcgggattttgcggacggagccctgctggaagaaagcgccattgacgcggaacgcggcatcatcaccagcgaatacaaggtgcgtgactccgccggttaccgggtcatgaaggaagtcttctccatcatgctggacggaacccgcattcccgaccgctatcccatcggcacgctggaagtaatccgcaccgcgccgcgggaaaaatttatcaactattatcggactcactacgtacccagccaaatgcagctcgtcatcgccggggacatcacaccggaacagggaaaagcctgggtggaaaagtattttggctccatgaagaaggacaactactccttccagacggaccggggcacgcttaaaacggctacggaaaccaccgcccactggattaccaacaaagaggccaccagcacggaagccagcatcaacatcgcccgcccctacgtgaacaagccggataccgtcgccaaccgcaacaaagatatccccttgaatgtggcttacgccatgctgaaccgccgtctggaaaagatggcgaagaatgcggattgcccctttatctccgcggaaggaggccgcgcggacatagtggaagcggcggaagtggattccattcagacccaggcggactacaagaattggaaagcggctctggccgccattgaacaggaactgcgccgggccattgaattcggcttcaacaaggaagaactggcggaggcccgcagcaacattaccgccgccgcggaaaacgccatcaagtcctgggctaccgccaagtcggaagacctggcttccgccatcgcccagagcgccgcacgggacaaggtcttcaccacgccgcaggaagactgggccatctccagggaagttgtggaaaacctgacacccgaacaatgccaggcagccctgaaggaagcctggaccggagcctttccccgcgtgatcgtcacttccaataaggaaaactcccagggaagcgccgaaatcatgaaagcgtaccgggaatcccagaccgctaaagtacagccctaccaggcggacggccgcaaggatttttcctataagttcggggatcccggcaaggtgacggcccgtacggaaaccaccgacctgggagtcacccagctcaccctgtccaacggcgtgcgcgtcaacctgaagcccacggaatttgacaaggactccatcaacatcacctttgccgtggacggaggggaactgagcaggccggaaaaggcctccgggctggaactttttgcgaatgccgtcatgaacggcggcggtttgaaagaccactccaatgacgaactggccgccatcatggcaggcaagaaggtaggggtaggcttctccatgacggaccgcttcttcctgctttccggaaacaccaacagggaagacctggaaacgcaactccagctccagacggcctacctgatgcacccaggttaccgccaggacggcgttaccctgctccggcgggccattcccatgatttataacaagatggaccatgaagtacagggagccatgaagaagcaggttccggccatcctttacaggaacaatccccggttcaccttccccactcaggaacagcttacctcctaccagatcaaggacgtgcgggactgggtggatgccccgttgaaaaacaactacatggaagtgaccgttacgggagacttcaggacggaagacatcatccccctgctggaacgcaccgtaggcgcagttcccaaacgtgcggaagctccggcaacgctggatgaaacgcttcgccatccggccatggcggacttcaatttctccaaggacctgacctatgactcctccattgataaaacgatggtctgccttttctggaaaacgcccggcggagaaaataaaaagctggcccgcaggctgaacatgctcaaggcagttttctatgaccgcgtattcaagggcttgcgcgaagacatgggggaaacctactccccttccaccggcctcaatatcagtgaaacctatccggatgacggctatattatcacgatgagttccggcgtcatgcgcaataaggaggctgtgcgcagcgccatcgccagaattgcggacgacctcggcaagggaaatatcacccaggaggaactggaccgtgcccgtaatcccattcttaactccatggaccgcgcccagcgcgacaacggctactggacatccctgctgaaagactcccaggccaggccggaacggctgaaccagcagagggaaagcattccggacgtaaaagccatcaccgtggaagaggtcaacaaacttgccaaagacatcttcggcaagggagagcatctcaacctgaacattctgccggatcacccggctgcggaaactccgcctgctgaaaagcaggcggacaaagccgactctccccaagccgccgtctctccggcggctttttgcgttcgcaccaccgtcataaagactgtcaacaaagactccggcaagaacggatatgccatcgttatttccgaaaaaacagccgctatgccggactggaaggccgtagcggacaaactggctgaaaaacacggaggcaccatcgtcaccgtgaaggattccgtattctccaggctggacacgcttaaaaaaatggctccccgcttcatggccgtcgtcgcgcgcccggaggaaatagaccgggtgctggtgaatgacctgcaccgcctgagccgccggctggacgacgacccttacggagactgtatctggggcattgtcacaggatacaccccccaggccgccatgagaatagcctctgcaacgaagcctctcgtcatcagccgcgccatgggaacaaccaatgtggattcctcccggttcaaagacagcatgagcatcacggactggcagcccttccaatacctggaacagcatggttccaagggcaaagtgacgccggctttctacacgaaaggcctgaaagaacaggacaagggggatgaaaccacgctgggcgtaacgcccaagcttatggaatactggaaacgttattccccgcagctcttcgtaacggcctcccacgcaacccagtttaatctggaaatgcccttcggcaagggcctcatcgtttccggtaacaaccggttctacgcgctggacaaaaaacagttcagggaattcaccacttttttgcgcggcgtgctcttcaacggaaaggaagacgacctgctctccttccttaatagaattaaagcgccggtgattgaaaccaggccggttccggcagtctgggtcgcggcggggaactgcttgatcggagatgccaagaagacgaaaaattccatggctgtcaccgccctgagccgctacggtttcaaccagctggtaggctacaccgtcccttcctggtatggcaagggcggctgggggacgctaggccttctgttcagcaaccatgacgcctccagcctggcggaagcctggtatttgaacaaccagttcattctggatgagaccatgacccgcttccccaagctcatggacgtccatttcaactccccggatatcaatggaatcaagaatgatccggactttgccaggggcatgaactccgccggatacggcatgggcaaggaccagctggggcttatccacgatcgggataccgtggccttttacggagaccccgcctggacggcgcgcctggacgaatcccgggctccgtccccgtggcatatcgactggaatgacccggcagatgcctccaaagggttcaccgtcacagccaacaaagacgccaaaggtcgcctgggagtctggttccccaatcggatcaacgccggcaaggccaccgtcaccattggaggaactgccactcccattgaaaaggcaggcctgctgaccaacgacttcctgctgctccgggaactggaactcaaaaagggagaaaaagccgtcgtggaaatggaataagcgtggaagaaaaacaagttgcagggatttttccccttccgtcggcggccaaatatccggccgccgctctttttccatagacaagcagcctccaaacatggatactcccgataatcaatccaccctatgactgattactccattttctttatcatcgccgtagtagcgacgggcgtgggagcgctcctgtttctcctgtccctgttcgggctgggggaacatgatctggactttgatgcggattccggcggagcggacgtagggttgctgtccatcaaatccggcatcggcttttttctgggcttcggctggggcggcgtgctcgcccagggtctggactgggggatggccgcttccctggcggcggcttttttcaccggcgtgctgatgttcctgatcatcggcatctccatgcgtttcattatgagccttaaatcagacggcaccctgaattatgaaaccctcaagggaatgaccggctccgtttacatcagcattcccggaaacctccaacgcggcggacaagttacaatcgcccatcccagccagctgctgtacctccctgccgttcaggaaggggaacatcccctgccctccggaaccccggtggaagtggtagccgtcactgcgggaatcgtcaccgtcaaacctcttcattaacaaacaccccaatcatcataccccaagacgactatggacaaaatcatccccatcgccattctggttctcttcatcattctgaccgcttcctggctgttcagccgctaccgcatgtgccctccggacaaaatcctcatcgtcttcgggaaagtaggcacaggccagccggccaaatgttaccacggcggctccaccttcgtgcttccggttctccagtcctatagctacctggatctaaaccctatcaatattgacgtgcccctccaaggagccctttcctctcagaacatacgcgtggatgtaccctcctccttcatcgtgggcatctccacccttcctgaaatcatgcagaacgccgctgcgcgcctgctgggccgttcccgggaagaaatccgcaacctggccgcggaaatcatcatggggcagatgcgcgtggtgattgcctccatgaccattgaggaaatcaactccgaccgcgaaaaactcatcaagggcatcacggaaggcgtggacgtggaactgcacaaagtgggcctccatctcatcaacgccaatatcacggacatccaggacgcttccggctacatcaacgccctgggcaaggaagccgctgcgcgcgccatcaatgacgccaccatcaaagtggcggaagaaacgcgccgcggggaaatcggcaaagcggaagcggaaaaggaccagaccatccaggtggcgaacgcccgcgccatcgccattgaaggccagaacgaagcccagattaaaattgcggaatccgccgccaagctgcaagtgaagcaggcggaggccaaaaagctggcggaagtggcccagaaggtgcaggaggctaaaaccctggaagaagcctaccaggcggaaaaagaagcggaattaaagcgcgcggaacgcgaacgcgccacgcaggaagccaacatcctggtaacggcccgcattgaaaagagccagcgcgaagtgcaggcccaggccacggcggaagtactcaaactggaacaggaaggcaaggcgcaggctctgctcatccagcgcagggcggaagcggaagccatccgccaactggcggatggcgaagcccaggctaccctcctgaagaaaaaggcggaaggggaaggcatggaaatggtgggacgcggtgaagcggccgcgattgaagccgtgctggaaggcaaggcccgcggttttcagcagatcgtccaggcggcaggttcttccgaggccgcttccaacctgctggtgacggaacagcttaccaagattgtggagctccagtccggtgccattaaggggttgaaattcgacaaggtagtcgtcatgggcaatggagggaactcctctgtgggaggattcgtccagaatctggtaaaggatacgctgccccttcatgaactcggcaaaagcgtagggctggaattgcccgcttttctgggcaaacccatggaagggaaaaccgcagcttcctcccctgctcccgcagccgatgccccggcggcagataccgcaaccaccgtcaacccgagttaacccctccatccccgccttcctgacggcaaccgccccgccacccagggaagcttccgaacggtgttccgggaattcccatggcagggaggagcggccgcctgacaacctctcccgtagccgcacagtcgaaacaagcggcataccgcattccgatcatagagaataagccggacatgccggtgaacccgcaggacagggaggcactagacagccttgttcatattgacgctggacgcatgccgcagcggaaaagcccacttaccgccagaaggtaaacagagtttgaaacatgaaaagagaatccgaatgcctgccttcaaacctaacgggcagatggcgaaacgccatattgattcattatccgtcattgagtattgttgattttccctgctcatggtacatatccgggcacgcatgagtgttctgcttcatatctgctgtgcgccctgttccatttcctgcattgaaatgctgcgggaagaaggaatggaaccaaccggattctggtttaatccaaacattcatccgtataaggaataccaggccagaaaggatacgctggtcgaatacgcggcaaaaatcggtctgaaattgattatgagggatgaatatggactgcggcccttcattcgcgccatttacccctccctggaaaaccgttgcggaacgtgttacaggatacgttttgaagagactgcacggtttgccgcagaaaacggggtcgacggcttttcttcaaccctgttcgtcagcccttaccagaatcatgaattactgagaaagaccgctgaaaaaacggcagagaaatttggaacctgtttcatttaccgtgatttccgccccggtttcagagaaggtcagcaaaaggccagggaactccggctgtacatgcagaagtattgcggatgcgtcttcagcgaagaggaacgttacctgaaaaagaaataactccattttaccaggcttttgccttttccccatgaccctgcagcagctaaaatatatcatcggcatcgtcaacagcggttccatcaatgaggctgccaaacggcttttcatatcccaacccagcttgtccaaagcggtccgggaactggaaaatgaattgaattttgagatcttccgccgttcttccaagggcatttccctgtctttggaagggacggaattcctttcctacgcgcgccaagttgtggaacaggcggaacttctggaacagcgttacctgaatacaaaacctctcaaacgccaattttccatctcgactcagcactacgctttcgccgtcaatgctttcgtcaatctcatcaaaaaactgaacatccaggagtacgaatggacactgagagaaacgagaaccttcgagatcattgaagatgtccatcaatcccggagcgacctgggtatcctgtatctgaatgatttcaacaggcaggttatcagcaagcttctcaaaaagaacgatctctgtttccatccccttttccgggcagaaccgcacgtctttgtcagttcggcacatcccctggcgcgccgcaggcaggttttactggaagatctggaagattacccctgcctcagttttgagcagggaacctataattccttttatttttcagaagaaattctcagcaccatcgttcacaggaaggaaatccatgtcagcgaccgggcgaccttgttcaatcttctgatagggctgaacggctataccatctgttccggagttctcagcgaggatttgaacggctcgaacattatttccataccgctcaaaaccaaggaatacatgctggtcggatggattgacagggaacaatcccgcccaagccgttcagcccttctatatatagaagagctgaaacgggttatcaccgaatacggctatgaagtaatccggactgacgattaattccggatgatggaggcggtagcttcgcaaatacggccggcgacatacgggttattcatcgtatacaggtgaatgccatctactccttgcgctacgagatcgataatctgctcgacggcgtaggcgatgccggcatcccgcattgcgatggggttatgctcaaacctttccatcatacgtataaatttcttcggcaaatggacatggcacagggaaaccatcctctctatctgctttttattgacgacgggcatgattcccgcttcaagagggacggaaatgcctgccagatccagtttttcccggtaggcgtgaaaaatatcgttgccaaagaacaactgtgaaatgagatggtccgctccggcctccaccttggtcttgaggtggcgaatatcatcgactatgctttttgattcgggatggccttccggatagcaggccgccagaatgtgaaaatttccctgttccttaataaaggaaatgagatcgctggcataggtgaaatcacggcacggttctctgtccgggggcaaatcaccgcgaagggccaggatattttcaattccgttccggcggaactgttccagaagctccaacacatttcccttcgtcaagctgatgcagggaagatgggctacgctctcaaccatataatccttcttgatggaggaggcgatgttaagcgtatcgctggttcccgcgcctcccgaagcaccataggtcacgctgataaaatccgggttcaatccctgcaaagcgctcagagcatggtaaaccgtcccgatcggggaagtccgcttgggaggaaacacctcaaaggaaagaaccctcttttggggaaacaattcggaaagcttcatgactggaattccgtacgcagggctctggccgccgccgtcatatttttgaggctgcctatcgtttcctcattgccgcgcgtctttaacccgcaatcgggattgacccacagtttttccggtaaaatcttccgtagcatgcgatggagattttccataatttccgtctctccgggaatacggggcgaatggatatcataaactccggggccgatttcagtcttaaacccgcattctttcaaggcatcgagaatgtccagattggaacgggaagcttcgaatgtgatgacatcggcatccatggaatcgatttcccggataatagccgcaaattcgctatagcacatgtgcgtatgaatttgcgtttccggcctgaccccgctatgcacgaggcggaacgagggaatggcccagtccaggtactctccatgccagtcggaacgacgcagaggcaatttttctttcagggctgcttcatctatctggatgatgcctatgccatgctcttccaatgccagcacctccttgcggacagccagagcaatctgcagggcttgctcctccagggaaacgtcttctctggggaaagaccagttcaggatcgtgaccggccccgtcagcatgcccttgaccggtttgtttgtcaggctttgggcatagacggcgtactccacggtaatggggcgcatccaggaaacgtcctcccagacgatgggcggcttgacgcacctggttccgtaggactgtacccaggctttttccgtaaaaaggaagccctgcaggtgctcgccgaagtattccaccatgtcattgcgttcaaattctccatgaacgagaacatccagtcctatcttttcctgcagggaaatgcattctttaatcctgtcaaagttgaattgcctgtactgctccccgcaaatgaggttcttcctgaatgccgcccggttggagcggacttccgcagtctgggggaaggaacctattgtcgtcgtaggaaacaggggaaggcggaaacgggttttctgaagcttttcccgctcttcaaaagacgggaatctcgtaaaatcgtcaggcttcaaggcgaatacttccgcctggacagcagcattttttcctatcctgtccgactgaaacaaagcatcattgacttgataaatcttttctggctccgcgttctccagcgaaaaaagaaagctaaggtcccggagctcctgcagtttttcttcggcaaaagagaagtgtttcaaagcatattccggcagtttcgtctcctgagcgaccgtatagggaacatgcagaagggagcaggaagtccctatgcctatgcgggcacccgtttttttcaaatcggccagcaacgccagagtccgggaataatgattgcgccagatattcttcccgttgacgacgcctgcaagaagaagcttatctttcgggaaaccatattctttcaccagggacagcgactgctttccttccacaaaatccagtcctaccgcatcaatatccaatccggcaacctgttcatagcagtcgcggatatctccgaagtaggtttgaagaaggaccttcacccgcccctttgaaggcagcatggattcatacaagcggagaaacaggtcgatatcctgcctgtccaggtcacggacaagagcgggctcgtccaactgcacccatgccgcgtccagctcatggaaacgggccagaatagcggcatacgcccgggccaactccccggcgacactctcccgcgtgcgtccccccgccaatgaggaaagcgttaagaatgtaaacggcccaatcaggacgggcttcgtttcaatcccgtatgaccgggcttcaaggaattcgtcaaagggtttactcccggaaatctgaaggggggcggaatctatctcgggaaccaggtaatggtaattggtattaaaccattttttcatggctagagccttgacatccccagccggcccctgatagccgcgagccatcgcgaaataagtatccaatgaagaaattcccaaatcccggtaccgctggggaaccgcatttaacaaaaccgcagtatctagcatctggtcgtaaaaagaaaaatcattggaagggatgccgtcaatgcccgcctccatttgtttttgccagtgcgtcctgcgaaggcggcttcccgtctccaacaacgcctccggtgccattttcccccggaaatactgttccacggcaactttgagttcccgtgacgagcctattctgggatatcctgcaactgatgttttcatggtatttttcaatctgtaatgaaatgcaggcttcttatagcaaatagcgttattattcgataatacaattattctatggtataatataacaaaaagctataacaaactactgcttgcaggttcattgacaagaaaccggaagcaggttaggatacggctttcaacctctcttcgactaatgaatatcaaatccgcccttttgacgctcgccacagccctcgctctctcctcctgcaatacgatcagcggaataggaaaagacgtggaagccatgggaagcaagattgacagcgcctcccaggccaccagcaagtccatgcaataaggcccgggaagtgccggacgctgctttaagccctcttttaatggaaaagaggcagtactttgcttcctgccattctgccctgaatggcagtcatccccatggggttcccaacgaattggcaaggtccggctccatcctgcatggaacacgccaaacctttacggccacccggaaatcagggcatgcgggcggcagcacattttttactggaaagccgcttcatccgggtggatgaagcggctttcgtccaaggtctctacatgacctttttacatggcccggctggtggaacgggcggcggaattaatgtcgctgccgaccgcttccacatccttgcccaccccgcctatcgtattgcaggaaacgcaccccagaagggtggcgatactcagaataatcaatttgcttttcatcgttttattggaagagttccgagtaatcagactctattcctccgccccccgttcaaagaaccggcaatcatgccgcaaagccccctgtcattctccgttcttgccatgcgttcccaaaacacttaaaaaacatgcgccaaaggaaaaaaatgccgggcggacattccgccccattaggaaccattactatttactaccaagatgattaaagtagccatcgtaggatacggcaacatcgggaaatacgctgtggacgccttgcgcgccgctcccgatatggaactggcaggtatcgtgcgccgccccggcagcgaagctgtacacggcatcaagaccgtaagcgacgtggaggaactgggccatgtggacgcggccctgctctgcacccccacccgcagcgtggaagaaacggctctgcccctgctcgcccgcggcatcaacacagttgacagcttcgatattcacggggacatcgtggccctgcgccgttccctgggagcccaggcaatcaagcatgacgccgtctccatcatttccgccggctgggatcccggaacggactccgtcatccgcaccctgatgctggccatggctcccaaaggcatcacgtacaccaacttcggccccggcatgagcatgggccacagcgtcgtggcgcgttccaaggaaggagtggcggacgctctttccctcaccatccccacgggttccggcgtacaccgccgcatggtttatgtggtgctgaaagaaggcgccaaattctccgacgtggaattcgccattaaatccgattcctacttcagctatgacgacacccgcgtgctgcaggtgcccgacatcgacgtgctgaaagacatgggccacggcgtgctgatggaacgcaagggcgtttccggctccacgcagaaccagatgttcacatttgaaatgcgcatcaacaatccggccctgaccgcccaggtcatggtggcttccgcccgcgccagcatgaaactggccgcaggctgctatacgctgccggaaattgccccgatggattttctgccgggcgaccgcgaagaattgattgcccagctggtctaacccggagcattccggacacacggtatcaggggcgctcctgccgcccctgttctgcgggccttcctttatcctccggtcctcaaccggaggatttttattgctccacaacgaccagcctgccatggacggccttcacccgggccggagtacgggtccgttccgtccagtcccacgctcgggccatgtccgcccaaaaggcggcgtggggagaatccttttcctctgacaaacgcgccggagtgggcacgaagggataaatctgcacgggaacgtttttttgcccatgaaccagagcctgttccaccatggtataaatctcctcaattccggaatcggtcatcgccagacagccgatggaaacatcccggccatgcaccatgatgaagcttcccgtccggttcagggagcggtcataggcattcggatacccgatgttgaaagacaaatggtaattgctccggggattaagcccggacggttccacttcataaaaaccttccggtgtttgcctgtccccttccttctccttggggcccagttttccggaccatgcggcaatcggatagcgcttggcaagcatgtagcattccgatttgtccggtttcacccacagttccaggacggagtcttcctttacggcccgtaaaaacacaagacttcccaccctggcgccgcacggctccagaaaggaattcagcacgggcgttacccgtttccgcgcgatatccgcacggttggaggatttttctgcacatgccatattgaaaaccgctacggcggaaaccagcagaaccagccccagcaaggacaggactacattcttcttcataaatcatctataatggcggcttttgttttgacaagcagaaaaccagccgtttctctccgaagaaggaaaaggaaaaaacggcggaaaaagaagacggaaagaaaagcggttcctgagaaaggcgcccttcccgaagctgtccccggttagaagccatgtctgtgctggaaatgcaagctccggagaagtattatcggccctcagaacatcagcggaagaccgacctataaacgccatggaaataagcaaccttcttcccatcactacacggaaggaattaagaatatggttggaaaacaaccacctcacttcctcctgctgctgggttctcacaacgaggaaaccttccccacatgccctcctttacctggatgccgtggaggaagccctgtgcttcggatggattgacagcacccgcaagaagacggcctccggtttcctggcccagcgtctcactccccgaactcgtatattttacagctccttcaacaggatccgcttatttacgccaatttcctggcgtttccccggctataccgccatgtgcgcctggataccattcaaattaaaaaaaaccagccggaactgttctgcaagcgcctggaaaaatttctgaagaatacccgtgaaaacaggatgtacggagaatggcacgacggaggacggctgctggaaaagtagacgccaggatcccgccatttccctgccggacgagctctgacgttaccaggccgttccggaataaatccggaacggctctggagggtcaggaggaaggcttttcgggggtaggaggggtgccctctccttgggttttccttcttttagaagtcgtagcggtagccgacgcttccgttgaccgagctggacccgtcacggatgtccgcgttcccgttcacgtagatggttcccttcgttcccaccggcacgcttaaccccgctcccagctgcagcgccgtcgttcccgttttcgcccctctcacgctttgcgcgaagccggggttgcccagcagggagacgttcgtttcccctctccggtctcccaggtcctgcgccgcgttgacccggatttccgccagcgattcccggccgaagatgttgctgcccaccagacccatccaacggccgcccagcgccagcgtccccgtcgtccagtcctgccggccgacgttcaggcccgcgttgcccgctcccgtttcctcatagccgtccatccgcgtcgtcaccaccgaggcgttgaacagcggctgcagcacgctgctgcggttttcgtcgaggtagatgtcgcaggtgagttcgtacatcgctccaaagccccatccgctggtgcttccctgcgtcccgtagcttccttccccgtagttgaccgtacggttgagtttcgcgtcgttccaccctcccgtcaggatgagcgtgtgcgcccagcgtttgttctggtagcgcccgaagaggctggcgtagtagctgtccaggtgtccgtcggcgctgtccgccgcgccggccgtcaggtcgccgtagccggccgtaaaggccgctcccgccgtgaggcggtcgctgaggtccgcgtccatgcctaccgtgcctccccaggtggtgagctggtagccgctttcatccccgcgggtgtcgagtttggcgtaggagcccgtgccttccatccacatgtggaagcgggggaggtcgtcgttgacgtaggccgggttgacgcccatgagggtggtccggttcctgatccagcccatctggtcgcgcagggcgtccctttgcgccgtccccagcgcgttgaccgtgctcccagccgccgccgccatggcgcgggaggctcccgcgcggtcgccgctgctttgcagggataacacggcgttatacagggtcttcagctgggagtccacacccaggttgaacctgcctccccagaggagattggcgccggaggtagaattgaaggtttccgccgaggcagcaaagacattatcctggcgtgccgtcccggtcaggatgatagagctgcctactacctccagtctcaggtcattgtacatggaactgaggatatcgtcctgcagggtcacttcccccagggtggccgttccttccgtggaggtgaacagcgtcagggagaggtgttccatttccgacgtagtcatggcgttcaggttgtgggttactactgtcgctccatcttccaaggagatgttcccttgagattggatgaccggcatcagagccgtcagttgatccatggtggctgcatccagattaatagtcagggtacctccggactgaaccgccagacctccggaaccaagttccagcctgcaattgggtgttcccgtgctgcccagagtcagtcttccctggtcacctaccgtaattgctccataggaaaccgttccggaagaatgttccagcaacaaggtgccgttgaacacttctatggtgtagtcggcgtttcctgtcccggccagcgtctgcatgcctccggacaccttcaatgcgcctctgcctgccagcgtgccggagaaggttccggaggaggttgtcgccgaggagatggagaggctgcctccgttcatggacagggtgccgctgccggagaggccgctgatggcgccggattccgttccggtgagggtcagcgtgccgtcggcggtgactgaggttccgtccagccgggcttctccgcccagggccagttccgctccttcccggatgcgcagggtgccgcttccggtgagggtgccgtcgttgatttcgcctgttccggtcaggttgagagttccctggatggtcagggttcctccggcttccgtgccggtgatggttccgacttcggcgttgccgttaatggtcaggccgcctccttccagagtgagggcgtccagggtgtttgacgccccgttgaggacgatggttccttctcgcagggcgagggtttccacgtccatcgttcctccgaccgtcagcgtcccggttccttccttgatgaaggcgaccgcctcgcctccgatgatgctgccgcccatgatcgtatccgttcctacccgggccggatccgtcactccggaatcaagttcgggattcagaacggcgttgtccagaatgacgatggcgttttcagtcatgtcggagttggtgaccctcagggaagagccttccagccccaccaggttccggacgtgaagcccttccccgttgtccggggctccggacaatgccacgttgagggacttgccggagtccagaacaacggccttataggcatccagggcagggtaatctgcaatggaagacggataggagccttcccctccggttaccaggtaaaccagattggaattaccgctgatcagcaaagctcccccgtccgttcccgtgacggcgtagcccagagaggaaagcagcgggctgaattggagctgctgcctgtaagtgtccgcatccgagaaggaaagcgtgcccgtcgtcagcagcaggcgtacgccttccgcggagtctttggtagttttaagcaaatccaccagcgccccgttactcaagtcgatttctgtttcatttcccgtcagtgtcagggaggaagcgccaatcatcgcctcccccggctctccggcgggaacggaaacgttgcctgttcccagcgtcaggacaacttttttgccgctcatgtccagggcggcggcgttgccttcttcatcctgaaagtccagacgggcccccgcggcaagaatgacggaggagagggcggaggaagccagcccttgcgtcgtgacggtgttttgctctccagcctcgacctgcacgccgcccgcagcggcatacgcgccggcacgagacagcgttccgttggaaaccgtaatgccgttcgtcagagcctggccgttcatgtccaaaaccccgccagtgacggtgaccgtgcttaagccgaaggcggacgcgcttccggcaaccaatgtcccgtcttccacgatggtgaggccttcataggtattgttcccgctcatggtcacctgcccgccttgctgggtaatggtgcccgttcctccaatgacgttggccacggtctgttccgaatccaccgcgtatgtcaggaaggcgtctcccaggccgccgagcgtcaccgctccggaaccgagagtgccggatcctgtcagaaggagggttccttccctgatcagggtcgcattggtatagctgctcgccttcgtcagttgaagcactccgttcccctgcttgataaagctggttccgttaccttcctggttaacgaccacatccagcttcaaatccgccgtattggtttcgtccagcgcaaaattaccgcgggcgatatcaaagacagccgttccgccgcggagggtcagcccgacagagggaactccctccgccacggaaaagacgctcatcccggcagcggactgctgcgtcacgatagtattggtgccactgtacaggtcaaaaccggctcccgagctgctagaggcagacatattcaacataatccggctattgttgaacaccatcctagtgttggccatggtggtattgggtccgccgacattccacgtgccgctattcagggtcaacgtgccgaagttcccgtcattttgatacccgaacggatcgcccgcggtagtgttcagcgtgccgccgttcactatcaaatcgccgtaaaggatggattgctgtccgcctccattcttgccgaggttcagaaccgcaccctctcccaccgtcgtcatgccggttttcgtctgggcggcggaaaccgtcagggatgttcccgcccccgacacttccagattgatatcggctccattggccagatcaaccccgagagcattggttcccccggagacaaaggcgatcgttcctccattgatcgtcggcatggcgtctcccagaatatccgcaatccctcccgcaacgccgatttccagccgtccggcctcctccacggtcaccgccccggttcccagggccttgttcgccttcacggcaacggttccctccttgatgttcaccgcgccggagtaatcattgttggagttgttgaaggtcacctttccttcacccagtttggtcatggttccgttcccggcaagcttgcctccatcgttggtcagttccaggtcctggccggttccgttattgaaataaacagccttggcattcacaacccccgtcagggacgccgttcccgtatgcgttccgtcaaacaggtaggtcgtggcattgttcacggctcctatcgggttgccgtcccagaccaccacgtcgtccgccatgctgacggaaaccgtcaccgttttggcggagacatccacattgaaggttccctggtacaggccggccagcgttccggtcagagacatccccccgccatccgcgaaattgccggccgccagattctcccaggaaaccagcgtgtacgtcccctcgctcacgctttcattgatatccaggctgacgagcgcctcctcgcccagggacaggttgcttacggtcagagccgcccctccggcgctcaaagcgcttccgtcaaccgccagggaagcggcgtgcagtgttccggtcacgttctgctgccgcagcgccgtcaccctggcggcggaagcgttcaatgttccggccagagccgtatccgcattcaggtaaagattgttccctgaaaggttcagtgttccggtaaaatcgccaacatcgccgcccagcgtcagggagcccgcgctgttgcgggtagtgacggccagcgttcccgcaccgcccagtccgccgagcatctgcaggctgtctcctccggcgagggtcgccgttccgctgccggacgtttccacggacaccttgccgttaagcgtcgcggttcctgtgattccggtaaagacgttcaggacggtcgcggcgttcgtccctttcagcgtgacatccccgtccagggacactccccccgccgcggctgcggcattcaagccgttgaacgtcaccgtgacatttttttcactgccgcccagcgtgacgctgccctgcccccacggggtcagcacctgcccggcagcgacggaggctgtgccgacattataagtcaggctgatgttactaccggttccggctatttccgtatcgccgtcataggaattcttcacccatcccgttttaaaatcccagccgttgcccccaacatcggaaatgattttcaggccgcccgttcccgtgatggcggaggtcagcgtggcattatttccattgctggagccgtcaatgacggcatagccgccttctccggcgtccagccggatttgcatatcgatgagacggttaccgttcccgttcagcaggcgcagcttggaaccgttccccatcgtcaatatgcccgtgccggtgatgttggtggcccagccggtctgcatcaccgcgttttctcccagggtgatgttcaggtcggagcttaacgtcccctctgccgcaacagcgagagtgcctgattccaccaccagcgtccctcccgccgatgcgttgaacgcgtccctgctcagggacagcgtgccgtcacccgtcttgacgaccgtcccggaaatgcctcctcccagcgtggcgttgcccgctccgatcaccagcgagccggctccgctgttaatcagcttgcctccgtaggcgcccgccgccagattcaggctgccttctcccgtgcgggtgatggttcccatccagccggccagggatgcccatgtgacggcattcccgttcgtatccaccagaacagcgttggaagccaacgcgcctgtctgaatttgtccggaaatgtccgccgttatcccagcgccgtatttcagagagcctccattaaagatgatgctgccggcacccagcgcggcgtcatgccgcatttccaccgtgccgccgcccagcaggacttctccggaaaaaccggcgttgtctgtggcgatggacaaggttccgctgccggtcttctgcagcttggagcttcccaccagggaaccggaccccgtccacgtataaccggttgcgtcagcattgacgacgatcaggcccggattcacctgcccggcgatgttcacggtctgcggcgcattgcctgctacgtcaccgaagatgactccgttgccgttggcaaaaggcaatcccgcattccagggggaatcccccgttcctcccaccgtccacgtattgtctccgccgcccgtccaggtcagggacgtgacctgcgccacgacgaatttcagggtattgtccgtcgtgctccagttgccgatgtattcggtccccagcagaatggtattggccagatccccggtgatgccgcccgtggcattaatcagattgtacgtgcccgcgctccagctcacgctgtcgctgttctccagcagcaggctgccgttcaccgtcagggcgccgttcagggccagcaggggattgccgttcaccgtcatgtgagtggcgtcaatccgcacggccgctcccaggttcagtttgccggtcatcgtattctgccccccaagggacaggacgccggcggtcatggacaggccggcattgctgtccacggcggagacgtccaggcccgctcccgcggacagggaaaggccgccgtaccccgcggaaatgccgccgatggccgcattccccgttacggaaaggttcttgttcgttcccattccggaggcatggctgacaatgagggtgccccttttcagttccacgccgcccgtgaaggaagaggaattggccagggtcagcgttccggagccgtccttgatcaaacgcccggttccacggaatgcattgtcactgcccgtgatcatgttccctgccccggtaatggtcagggcgccgttcagctggatattatgagtgtcgtcagcagtgatggacatggtgctgccggcattcaccacctccacggcgccgccgcccgcggcgactgtcaggccgttcccgaaggttccgtcgctttccttggtaatctccaagcgcccgttgttcaaggtccagtaccccgtattgacggccatggaacccagccccgcgccgttataggtatattctcccacgcgcagcacgccgccgttggtgacggttaccttgtagcgcgtataattatcccccgtcatgctgaggctggctcccggagagctcaaatccagcgtggcgttattaatagtcagtgttttggagattggatcactcccgattttctgcgtagccgccgttttaatcctgaaaacgccgccgccggtgatggtgaggctgttattgccaatattgaacgcaccctccgcctgggtaagcgtctttccggcctcaatggtcagcgtcaggtcgttggcgccgatggtcgtagcctcattccaggtaacgtccatatcaaacgtctggttggtcgtaatggtgaggggatcagcctgaacagaggcggacaacgcagcgcagcaggcaagaagagcggacaacaagttgacaggcagatgaagcttcataaaaaataactaatagtcaatatgttcaacacgacgtaattttttcaacagagataaaatacgctattaaccatatgcaatatcggattcgaaatccgttgtcaatgaccatttttgaggccaagccctttaggaagcatggaacggcctgaaaggggaaagagaaaaaaacggggataccagtttcaagaatcggcattattaatattttaatcattatctgggttaattcacatcatttgcggatttcgaatccgtccggttatttaacctgtttctcccagcaagaaaaccccgcatgcaggaaaaaatgatttcttgtcttgcatttctgcgggagcgcctgtataagccttcccgtccccgccgcaaggcagggacggcatccaaggtcatggagcggtagctcagttcggttagagcgccagcctgtcacgctggaggtcgcgggttcgagccccgtccgcttcgccaccttgttcagaagaaacagccgcctccgggcggcttttttcgtccagaaaacctgaattccggaaaacaggccgccccccccgggaacgttttactggaaaaaggggttggacttcagtagaatgggggccagcattacaatcatgagcatactttcggaccgtctttccgcggaaatactgcaggcccgccagcgcgtctacaccgttggcgagccgactcctctccagcgattgaatctgccgggcatccaggccccggtatacgccaagagagaggatctggggcccatccgggcctataagtggcgcggcgcgttcaactgcatggccgcattgagccaggaagcccgtgacaagggcattgtggcggcttccgccggcaatcacgcccagggcgtggcgctggcagccagagtgctgaactgccatgccaccattttcatgccgcgctccacgccggaagtgaagcagacggaagtgcgccgccacggcggcaggcatgtgaagatcatgctccatggggactgctatgacgagacggccgccgccgcccatgaatacacggaaactcatggctgcacttttgtccatccttatgacgacctggtgaccatggccggacagggaacgctggcggacgaagtggtgatgagcggagaaggcccttttgaccgcgcgtacgtcgccatcggcggcggcggactggccgcctccgtggcgtgctggctgaaaaaattctggccccgcatcaaggtcatcggcgtggaaggcatcgaccaggcgtccatgaaaacttccattgagcagggacgccgggtgaatctggattacgtggatgtcttctgcgacggcacagccgtccacatccccggagaattaacctatcccctttgccgggaactggttgacgagttcgtgaccgtgaccaataatgaggtctgccaggccatccgggccatgtgggaatcctcccgcgtcgtgccggaaccatccggagccatgagcctggcaggattcctgaaacaatggaaccggggcgaagtaaagccggaggaaaagagcttcgtggtcatttccggagccaatatggatttcacccaccttacccagattgcccggcaggcgggcatcggcaaccatgaaacgcgctatctgcgcatttccatggattccaagcgcggacaggtgcttaaatacctgcgccacattccgcaggatacgacgctggtggatgtgcaatacggcaaaacggagggaaacacccagcaccccgtgttcggcattgccgcttccgatgaagacctggataccatccgcacgacactgaaaaagaaaggaatagaattcgaagacatcagcgaggacgacgacgtgcgcttccgcatgattcactaccagccggaactgtgtcaacaccccctgttcgtccacattgaatttccggaacgcgccggcgcctttcttgacttcatggaacgcatcgcggatctggcttccctctgttatttcaactatacctacaccggggaacgcgtaggccgcgccctggtgggcatggaatttgatacagcggaagaccgggaaaccatccggaaacgcatgggcgccttttccaaaaacattatcaggtccattcgggaaatttcccccgaggctttccagaggatcatgggaagcagacagttgacaggcaatcattgacagcccatcatccagggagcttgagaaaaatcggctccctgtttttcatgaccgcttttttctcccatgattccgcccgtcatcctggcctcccaatcgccccggcggcgtgaattgctggagaaaaccggcattcctttttccattattgtccggggcacggaagaactgaaagaggcttccatgcccccgcaggaactctgcctgcacaatgccgccgccaaggcggaaaccgtgttccgggaacatccggattccaccgtcatcggcgcggatacgctcgtttttctggaaggctttcctcttggcaagccggaagatgaagaagaagcccggtccatgctccggaagctctccggacgcacgcaccatgtctgcacggcggttgccatccgttccccgctgggcatgaaaaacctggccgtgctgacggaagtaacgttccggaagctgacggaaaaagacatccgccattacatggaactggtggacgtgatggacaaggccggctcttacgcctttcaggaacacggggagatgattatttcctccgtgcgcggggatacggacaacgtcatcggactgcctgtcagggatgtgatgaaatgcctgaacgacctgggataccgggtttgacccgtccaggaatccggacattgtctccggaagaaaaggcgtttcccgccccgaaacggccttcggagcgcaaggcaaagccccaggcttcaggaacaggggattacctgtctgccaggaatgattccagtttattgtaaaaggccacaggaagcacggcttccagcaaggtcccttcctctacatattccgtagagaaaaccttgccttcactatgcatggcggccaccaggtcgctgcgggtatagggaatcaggaaccgggcgcgccggacacggctttccagcatttccacgcaggcattcagcaggtctccctcaccattcccttctttcacggacatgggaaccaccctgccgctgaaatgaggcgccagcagcgtttccagggccccgcgccgttcttccggcaccaggtccaccttgtttagaaccacgatcatgggcttgtcacccgcacccagttcgttgagaacctccagagtcgtttcataatggcgcacggcttccggatcggaagcgtccaccacctgaatcaggaaatccgccagaacggcttcctccagcgtggacttgaacgcttccaccagacggtgcggaaggttgcggatgaagcccacggtatccgtcagcagcagcggctgcccatggggaagctctatcttccgcgttgtggtgtccagcgtggcaaaaagcatatccctggccatgacttcagacccggacaccagggacaggagggaggattttccggcattggtataacctacaatggcggccgtggcgacggcctggcgctcccgttccttgcgctgcgtggcgcgctgacgggtcaccaggaccagttccctttgaatagcctcaattctggcgcgcgccaggcgacggtccacttcaatctgcttttcaccttcccccctggcggctccgccgcctcccttgccgccgccggagcccccgccctggcggtccaggtggttccacatgcgggccatgcgcggcagggaatactgcatgcgggccagttccacctgcagggtagcttcccgtgtccgggcgcgcctggcaaagatgtccagaatgacctcttcacggtcaatgacgcattcgtcaacaagccgttcccattccctctgctgggaaggggagagcatattgtcaaaaacaacgcaatccgcccggcaatccagcgccagctgcttcacttcctgcgcctttccggtgccgcacaggaatttggcgtgcatgtccctggacttgacgaggtgcttccctgcgatgccgatgccgagattggagacaaggtcttccagctcatccagcatggcctgtttttccccggcctcggagggatcgaagtaaatggaaacgagcatggcccgttccaccatttccggtttttcgcggatttcaaacatacagggaagttaacggaactgcttgctggaggtaggctggtaatccttcagagcgaagtccgcgggcttatgacaatcacaactgcatgaagagaggaagccggccacgcatgccagcgtcagaaagctgatcaatctcatgcggctatgagacctgtccgaagtaccctaggcaagcaaattttacttcatcaccattacttttctccaaatccggaacaaaggcatttacccggacggttttccttttttccggcccgggggcagccggcaaaacacgcggcgggggcagaaacctgccggcgacagcaatccgccgcctttcaagggactttattcccttccagaatcaacttgattttccatcgtctcccggcagcccttcctccgcctccagactgttcatccataaattccatttttcaatgaaagagcggtccatctgaagcaatgctttttcctgctgtgcggaggaaatggttcccgtcagcctgccaaaaataagcaaaggcttggaatacgtatccgccagggaagaaaattccgcaggctgcttctggcggcattcccgcgccagagcatgcagggagttgaacggaagctcgttccaactgacctggtacgcaccgcttccttcccggctgtcctgaggctccacggtcagcagatgtcccttcatccctttcaggcgcaccctggagccatctctgagcaccagagttttccccggtttcttttccaacagtacgggcaaaagtttctccatgcgggagaacaacggcagcatctggtccgtcatttcccggcgcatggccagacgggctttcaccgcaggagaggaaatgactttttcagcctctccataaacagtggaaactttctcataatcaccggtttccttcatgatgccctccgcttcccggcagacgtcttcataacttctggattgggcggccagcaggatttccctcctcttttcctcctccagttttttttgcatctcttccgcctttttcctttcagacgccttcacggcttccgcagcctcccagtcccgcgcagactggtactgcatcctcaaatgatccagtattccttccagcgcggcataagccggagacatggaaggaacttccccaatgaccatctgttcccgcaggaagtccgccgcggaccgtttggcctctacttcagccaccgttttttccggcatgtcctgaagacgtttcaagcgcgcgtactggtccgtatacttctccaggttgctgagccacgcggaagccagctcacggacgttcctgtcccggtcatccgccgcatcagcggccacccggtccagaaagccgccgtattccgtccatctcccggcaaagtaccaggatttcagcgccatgcccacataataatgcacggccaggtcagaattggagcgcagccccggcatccgggaagaccagtctgcggagctcaggtacatgaccaggttgccaatatccctggaacgttccagttcctcagggtccccgcaggcttccatctttctgcccagttcttccagacgcttcaccccttccgggaactggccgcgcacccacatgcacagaacctggttcaaaccggcccaaagggatgtggacagggggcagtccggctgagccgccaaatcgccgaacatggcggcggctttcaccagatccccacggttcagggattcctgggcttcgttaaacagtttgccgaagcgtatgctgcgctccagccgcgattccgccgcctccctgtcttccaaggctgcttccgccgcaggagaaataggcgaaggcggagttacgggagaaggagctccatcctcccgccattccgcccatccccaaacgcccaacgccagcgccactacggaaacaatggaggaggcaacgatgatgcggcatttcctgcgccgtgcgtgccgggcctccaccgcgcgccgttccgcccaggtgagaccggattcctgcatggcccgggcgtattcctcctgcgcctgttccacggcatccatcaattcgggataggaagagaacctgtcttctttattaaaagccatcagtctgtccacaatgaaacaggtcattggagaaatgtcgttcaccacctgctccaggagagggagatctttcttgttctccagaagaatatcggaagactgggaagcgtccacacggggaggcgcacctgccagcaaatggtacatggtagcacccaaagcgtacatgtccgtacggaagtcctcctctcctcgcaacagcgtttccggcgcggcgtaataaggagtaacccatatttcccgctccatgtcggattcgctatgaagcagggacaggccgaaatccacgattttggcgactccgtcgggggacaaaagaacattggcgggcttgatatccctgtgcataaggcccgcattccatgcggcgtccagcccgcgcacgatatccagcgtcaggcgcagcaccctgtcttccggcacacgttcctccgcagcaatcagggcatccaggccattgccctccaccagctccatggcaatgtaaaaaaggccctggtcacgcccaacggcataaagctgcaccaggttttcatgggaaacccgcgccatgatccgggcctcccgttcaaaacgttcgcaacgcagggcatccccggcataagcatcattcagcactttcagggccacttcccgccccagaacggcatcctccgcccggaacaccacgctcatgccgccttttcccagttttccggtaatacgataaggccccatgcgcgtttttacacgcgtcagcgcctggcagcccgggcaaatggcgttggcgtacggaggcagcagggaaacatccatgggctgtccgcacgccgggcaattgacgacgttttctttctggggaaccatgaacgcagggcggcggaacgggaatcagaaaaaaggaaggaggaaaaatggcgcggattgtccgcccccctccgaatatgagcagggagggcccccagccagggcccctcccgcaaatttgattaatcccgtcaggagagagccggaagggaagcggcggctacggcctgtccgtggcgcttggtcttttcatccggcacgcggagctggatcttcagctcggggaattcggtgcgcagcacttcttccgccttgtcaatgatgatctggccgccgtctccggaagccacacggcccaggaagagcaggttgcggatatcatagaacctggcgtaatgggcaatggcatagccgaagtgcacgccgatggtttcataaatcttgcgggcgcgttcgtcgccttccgccatggcggcctgaacctttttaagctgttccgggaagggcattccttcaaactggaagccggcgcggggggccaggcgggccacagcctgctgggagaaataaagggcgcctacgcccatatccttggaccattcgtccactccgccttcctccgagtagtccacaggggcaaaagccagttcattcagccagggcttgatgtggccttccggatccacgtagccggcggcctcggaggtgcccatggccacgccgagcacggcgttatcgttcatgcccatggcccctgcgagggcggtgacttcaccgtcattcaccacttcaaagggaatgttgttccatttttccttctggagggtgcggaacaccttgccgagagtcttttcaatgtcttcctggctgacgccgcggaacagggaggaggtgcgtacttcactgttgatgatcacgccggcggaggatccgccgatggcgtccacccgggggagatgagcggcggcgcgttccagagaatcctgaattccgtcaatgtgatactggggatccttctggaagtaagggtcccagaccacttcctcggaataaactacttccccattcaccacggcggcgcatttgcggtcggaaccgcccaggtcaaaaccgatgcggcatccgtccaggttgcggcccagtgtcatggagccggagtattcctcgggaagttcttccacggaaacctttttcacttcaatcggggagccgtaaatcttcttgccgatgaaatcccagtcgaattcgcggataccgcccttgcaatagcgggaggccagcatgtccgcaatagcgtcatccccggcgacgaggatgatattgccgcccttctgccacagcaggaatttcacaatgcgctccacataggtttcattcagggcaatgttttctccggtatggggaagaagcttgccggaccagcggaaacaggtcccgtcattgcgggtcagagcgatatccacttgatgagaagcaggatcggcggcggctttggcctcaaaagcttgattccaaagaacggccggcacgaagccggggtccagcacaggcgtgattttgggttgaatattcatggcgataatccgttgggaacgtagcatacccgcttttccttgaaaagtattcattccctttccttatgattttttttgcggaatgaggggagatagctcattttctgctggaaaatcaccgtgtttccactaaagagacaggagcttttcttccggcgcggtactctggaagggcggcccattccacacatgcctattccatgaatgaattaacggaccagctcattaccctgttctcttccatcctgattaccgtcatgttcctcgccgtggcggtaaacatattccgccggaatcatgcgcctgatacccggcatccgctgaaatggcgcattcccgtaggccatctggacatgctggacatcgccatgtgcggcatcatcgtgctttacttcagcctgggggccctgttggcggcagccacgcctccgggggcttccgctccgcccagcacaaccaacatggagctggacagctacaaggttttcaacggaacctgcctgaatctcattctggccttcgtcctgctggtgcgcatgttccatacgggccggatggaggcgctgggattgaaaaaacattccctgaaagtcctcctctacgctccggcggcaggttatctgcttgtgctggccatccatttcctgctggacaaggcgggcctgttccagtggattgaacacgccaccaacgccccggccgaacaatccattgtttccgtgctgaggcattccagcgacattcccctgatcacggttatctgcttcagcgccgccatcgtcgcccctctggtggaggaacttattttccgcggttatctgtacccgatcatgaaaaaatacacgggcgtctggtttgccctgatcaccacctccctcctcttcggcatcatccacgtcagcctggttccgttcatccccctggcaatcttcggagccgtactggtgctgctgtacgaatacacgggcagcatctggacgcccatcatcgcccattgcattttcaacaccgccactctcatcaacattctgtatcccggcatccttcttccgtatggaacctgagcccagcatccggcagacgggagaggatgcgctggtagcccgcctcctgcccctgatgccttccaatccgtccctggaaacggggccgggagacgactgcgccatcatccgggggtcaggcaaccgccagctgctcctgaaaacggactgcgtggtggaaggcatgcatttcctgcccggaacggacccggagctgatcgggaggaaggcgctggcacgggccgtttcagacataggggccatgggcggcacgccccttcacgcactggtgaccctgttcgtgcacgcagaccgccccatctcccaggtggaaggaatttaccgcggcatggggcggctggcgcggcagttcggcatcagcatcgccgggggggaaagctccggcctgcccgcagacgggcttatcatcaacgtggcgctgaccggagaagtggaggaaggcaaagccgtactgcgcagcacggcgcgggcgggggatctgattgccgtaacgggaacgctcggcggcagcttccccagcggtcaccatctttccttcatgccgcgtgtcagggaaggaggcatcctggccgtctccggcgtagccacctccatgatggatctttccgacgggctgggcaccgacctcccccggctggcggtcgcctccgggcttgggttccgtattcatgaagagcttcttcccgtgcgcccggggttcactgcggcccaggctgtaggggatggggaggattacgaattgctggtgaccttccgtcccggcgaccgagaacgggcggcacgactggccgcggagcattttccggaaacgcctctcaccgtcatcggggaaatgactgcggaaacggcctccgcccttcccccaggttacaggcacttcagctagcccgttaagaaccggggtctgagcgacgcaaaacgcctgcggaattattccgccgccttttcctcctctttctcccgctgcatgtaaggcaggagctgttcatacgcgtctttgcccagataacgcttgatggaacgctccggcgttttgaaaatgtccaccaggatcaggcagtccaatacgtcgccaaaatgcttgtccacgctgaaggaaagaattttgccgttcaatttcagatattggcggagcaatacgggaatgcccttgccatcctcttctatatcagcgaccaattgggacagcccctgggcatctgccagccccagagggaggatgcatgattccgacctcttcagatccgctttacggggcggattgtaggccctcacctcattcaccagcacgggctccatttcatgcgccttcagataggagacgatgagggcgcgggaaaggttggtgtaatcccgggaaatgctgaccgtgccgaacaggtagcggtaatggtggttgcgggccatgaactggccgatgccctcccaaatgaaaccgagagccagcggcctcttctggtattccggaacaatgaaggcgcgccccatttccagagagcggtccagcacccgcaaagcggcaggggaaaaggaaaagtattctccgttgtacagccctttgacaccgtagcgggcaaggattttgtccgtttcccccatgcggtaggcgcccacaattttctggtgcgttctgtcccacaggaacaggtgcttgtaatggttgtcgtatgtatccaggtcgcaggcgttgccggaaccttcccctacctggcggaaagtatattcccgcaaacgccctatttcaataaggatattggggatttgcagggcatccgccacgtacacgtcccaatctccattttcctgacgggcatgcagacactccgggggcagcgcgtcgatttccgcctgcatatcctgcacggaaacgggggaggtcagcgcggccatctttgccttccggtcctttttgtgcacatgggggcggcggcttttttcataacttttgcccagcagataggtgcgcaggcgcagatgggagacgatggcttcatcggaatcatactgtccaagctggctgaacggaatgggcttgcctaccacaatgcggtgtgtccggcggccgtcccgacccacttcacggggaaggaacgccacgcgcgccttgcggttgatcagggaaatgccctggaacagcagactgttgcgccccgggaaatatacgggcaccaccgtcgctttcgtcatgcggataatggcggcgatattcgcgttccaggggtcgtccgtcacccttttgtgagccagggaaaaactggagaccgtgccggcggggaaaatgcccagaaccccgccctgccgcagccaggaaatcatcttgcgcatgccggaaaggtttttgcgccgggcgttctcatcttcatacacgtccaccttgatgagccagggatccagctccccgcacagggaaagctgctcgttgaccaggatgcggacatcctcccttacgcgggtaagcagctccccgaacatgatgccgtccgataagccgtgcggatgattggcaacgacaacgacaggccctttcttaggaatattttccaggtcccccgggcgcagctgaagcttcaggttcaaatgcctggaggcaagctgaaagaaattttcctgagaaccggattccttgtcgcgcacgatcttgtcgtacgccttgttcaggcgttccaggcccagcagcttttcggcggacgcggccaccagagcaggcagacgcgtattctcgtccaaaatgtctctgatgtccaccatcttcgggtgtttgagctgggccatgccccgctgtataacggatttacgggaaaaagtgaaactctttttgcaacgcccttcggaacgcagtcttgatttccacagggctcaaagctacaattcaaacggctttagcccccatttccaactcagaagacactcatgcatccagccatcgccattgacggccccgccgcctccggaaaatccaccgtcgccaagctcatcgcggaccgcctcggctatacgttcatcaacaccggggccatgtaccgggccgttacctggtacatgctggaacagggcatcaaccctgcggacacggcggccgtgctggaatccctgccggccgtgcccctctctttcggcaaggacggcagccaatccgtagttctgtgcggacagcatgtgctgggcgaagaactcacgagccagcaggtcaacgaccatgtttccaccattgcggccatcccggaagtacgcgccctgctggtggaacggcaacgggaatataaccgccgggaacccgtcgtgatggaaggcagggacataggcaccgtggtttttccggatacgccgttcaagtacttcgtcaccgcctccgaggaagtgagggccgcgcgccgcgctgcggagggactgacggactccatcgcggagcgggaccgcaaggattcctcccgcgccaccgccccgctggcgcaggcgcctgacgctcttctggtggatacgtcagacatgacgattgaccaggtcgtccgtttcatcaccgacaacatccaacaaaaactctcctccagatgaactctttctactgggttttctacacgctcttcaaaagcatttccaaagccttcttctcctggaaagtcgtcaaccgggaaaaactcatcgaagacggccccgtgctcatcgtcagcaatcaccagagctttctggatccgcccatgctgggcatttcctatgaggacggcatctatttttttgcacgcaagacgctgttccagggcattttcaaatgggctctgcccctctgccaggctatccccattgaccaggaaaacccggatgccgccagcctcaagcacgtgatacgcctgctgaaatccggcaagcgcgtactcgtgtttccggaaggctcccgcacgccggatggtaagatccatgacggcatgggcgggatcggcctcatcctgagcaaaacgaaagttcccgtgcagcccctgcgcatcagcggtgcgtatgaagcctttcccatcggcgcccggtttcccaggctccgccccgtcacggtcacggtgggagaccccatccccttcacgccggcggaactcaacgccaaaggaaaagatgcataccagcacctgacggacaaaatcatggacgccatccgctccctccctgcggaataaccctcttttcccggccccatgatctccaggctgaaattaatggacttccgttgctacggaagcttctcctggcagattccgcagcagggggccatcatcctgggaaacaacgcccggggaaaaaccagcctgctggaggccgtttgcttcctgctgcgcctgcaatccccacgcacagcccggaccgggcctctggtctcccacggaaaacaatccttcggcatccgcggagaacttccggggcaaatccggcgcatcctgtgggcgccggacgctccggacctccgcgtcaacggagagccccgcaaagaccagcgcagctacctggcggacagctatcccgtggtatggatggggaatgacgacctttccctggtgcaggccggcgcggacgcccgccggaaatacatggactttctgggcagccagtggcatccaggctacagactggccctgttcagctaccgccgggcgctgaaaacgcgcaattacctgctcaagcacaggcaccgggacaaactccagctggacgcctacacgcgccagctggccctgcacggcacggaactgagaaacctgcgcgcccatctgctggcgctcctggcgccccatatcgccctggcctaccgcaatatcggcggaaggcaggaacaggtctccatcgcttaccgcgcctcggaggaaggagacctgtatgaacggctgtgcgcctccatggaccgggacatccggtacggacaaacccagaacggcccccaccgggatgacctggacatcacgctgaacggcagaaacgccgctcaattcgcttccgaagggcagcagcgcaccaccgccatctccatgaagctggcacagtcctccctcctgacggaagaaacgggacatacacccatccacctgattgacgatgtcttcggggagctggatcccacgcgccggatagcctttctgcagtcgcttccagcggacgcgcagagcctcatcaccaccacccatctggactggctgcacgatgctccgtgccccctgccagccttccggctggaggatggaacccttgcccccctctgaaaaagcgcggacagaaacaacgaacaggcgtccgcctgcggcatttccgggacgctattccttcacccatacgttcaggatttccacaatatacattttatggaaatccccggcggcataccactccggcacaatggttttatccagaaaagcttccggattgagaggctccgcgtacagcttgcggcactccagcaccaggcgcgcttccgtaaaacttacattgccgttctccgtcacatatggcgtcaggccggaggcggccaccttgtccgtatcccgtccgctcgttgttccgcacacggtcagagccttatggtactcatggctgaaaaaggaaagcgtcagctcgtccccggcctcaataaaacggaaggtatggcgctgggggcggataacgacaaacgccacgggcttcttccacatgaaccccaacccgccccagctggccgtcatcatgttgaaatgctccggagaacccgccgtcaccagcatccaatcgtccccgatcaattgtacggcattatcctgaatctcttttggttcaatcttcttcatcatcgtctccaacgttcgttcgcaaactattctatacccttccgcccatatgtcaaagctaggggacggccgggatgacgcgggaatcccactcatcaaatagcctgtccactcacatctatgacatgcggaacgaaagattttttgttgacacttcactatgctgctgctttgatgtgcacatcaaagcagcagcagccattggttgcagcgtcttctttatgaggcacgaaaaatgctgcattttctacttggctcttcatctccggatggagagccattttactttctttccgacgaactgcccatgcctaccaatcctcctccatgtaaaacgtttaaaaccttcgaggagcaggccaaactactaataacccgccatctggaagccagcaaagatgatttaatatgtcgcctcaaagcggttaattactatcgtttaactggatatctccacatcttcagagaaacaaaaacagatcatcagggtaacagaaccaaagcggatgactaccgccatggaacaacgcttgaccttgtgtggaagtattatctttttgacagaaggctaaggctgctcctattagatgctatcgaaagaatcgaaattgccctaagaacccatgttgcttattactgggcaaaatcgaccaaatgctccaacccacaaaaattttctaccagttacagaccggatttcaataaaatcacccgggatggcaactctgaacagacacgctcacgcaaagacaatttgctgaaaacttttcaaaggtcttttgatcgcagcattgatgactgcgtattgcaccacaaggaagatttggggttccggaatgttgaagaccttcccatatgggtcttcgtagaactttccaccataggggagttagcatggttgttctccgggttgaaaaataatttacagatggaaattgcatcaaacttcgggtgtccggacattattttcttcacctcattaatcactctcattcatcatgcaagaaatgcgtgtgcgcatcacgccagagtatggaacaggacatggaatcaaagccgtggagcaacaaataatcctgccgcgcgaatacagctgaatcctatcgtcaaaaacacctcattaactgattggaaccttcaatgggataaaaatcagaaccagtggctcccacgggcaaaagccgcaagggagttcagctttcaaaaaacaagtacggcatttctattaaccgcatgcagatatttcctaagagcatcagcccataccagcgcatggaacgccagggttatggaactcttcaccagagcggatacgccctcaaacgtcattgtggaaatgggatttcccaaacattgggaaaagcatccattttggacaaattaacatttgcggcatctgttccaaccacgtctctttcctgaaccaggggggctctttggcgcagattccctttggagttgcatttccggaacggcggccctagcatttccgggatgaatcacaccgcgctggaagacaagctgggttaccgtttcaacaatccggatctgctcgttcaggcccttacccaccccagcacggacagcaagccggaaacgcgccgggcgtatgaacggctggaattcctgggagacgccattctgcagctggccgtcacacagtacctttaccaccacatgccccaatccccggaaggggaactgacccagctgcgcgcccgaaccgtcagccgcgccaatctgggcaaatacggctttatcctggggctggataaacacattgccctgggaaagggggaggaacgggccggcggacggagcaaaaattccatcatcgccaacacatttgaatccgtcttcggagccatgtccctggattccaactatgaaacggccaaggctgtggccctgcgcgtcctccatgaagctctggattccgcggccagccatcccaaggaaatcaaccccaagggggaactccaggctatccttcaggacatcctgcccgaaactccttcctatgaaacggaagaaaaagggccgagagacgccgaaaaccgttttgaatcccgcgttttctggcatggtcacgccattggagccggttccggggccagcaagagaaaggcggaagtggccgccgccgcagacgccctggacgccagggcatggctccgcatgaccttgtaaccgccaaagggggacgggtggctattttgtcacccttaagccttggacactcctgtggctggtttgatagacagaagccgtctccgtgaggaagaaccttccccggaagaccttctcacagacaaaccaaccatagaaaacaaatgaagacctatactctccccgtcatcggcctcatgactctcggagcctccgcctttgccgctgccgctccctctaccggaaactccctgccggcccgcgacaacttttccgcctgcaaatggctcggcgaccgtttcaagtggttcaactcggaacgggaccacaagaatccctacatccaggaattcaacgtttccctccgcatgcagtacggactggactggattgacccgaacggcgaaggccgcgtcatgggagaaaaggaaggcaacggccgccgcttcaacgatgaatggcgccgcttccgcgccgggttcaacatgaagtttctgaacaacttcaagctcaacaacgtctggaacatcggcggcatggacggcctggaaagctacaatgcaaaaaccaacacatgggacacctccgacctgacctactccctttacgaactgaatctggaatacaagggaggccccgtcacctatgccatcggcaaaataaagccgcgcatcaccggggaataccgaacatcctcctccgccattctgactatcgaacgctccatgctggtcaaccagctccgctcggaaaccaattacggattccaggtgaacaattccgacaaaaaggataagctcggctgggcagcaggcgtctggctgaacggcaacgggggcaccggaaccggcacgttcaacaaccgcattgaacccgctttcaattcccgggacaactgcttcatcaccggcacgctgagctatgacacgtctaacgacgttttcctgaagaaaagccgtctgtggctggattacgcccacaatttcaccaagtggggggacgacgcccaaaacaaggcgtatgaaaaactgaccggttacggctttaaatccaaataccagggtaccggagccagggacgtggtagccctgacctgggaaggttccgagggggacttctccctgatgaccgaagtcatggccggcttcaacgtcatcggcatgaaagcgggggctgaaaacgtcttcggcgtgaccgtcatgccgtcctacaagttcaccccccactgggaaggagtggtccgctaccagatggcggcgggcagcaacgccgtaaaatgggaaaagcgctatacgcagaactccacttattccggaacttccgactgcatgcaggccctgtacctgggcgtcaactactacattttcgaatgcagcccgaacatggccaagatcatggcgggcatcgaatacgcccattccaacggcacggacgccagccggcagaaaggctttaccggatggagctacaatatcgctttccgcaccaacttctaattgccggacggcatcatcccgtcaacagctggccgcttctgttcaggggcggccatttttaatggcgtggcgccctgcatggcagttcccccaaaaaacggcagccgtcatttccgtaatgccttccatattcaaatacctggttcttagcaaatcggaagaagcatgccccatttccatctgcaatacatgcaaattcttgaaatgcctggcaaaataactggcaaacgtatgccttaacatatccgcaggccacttcttttccttcccgtcccacccggccaaccgtctcagctccctccacttcgccggccagttgcgcgggcatacgcttcccgacacagatcccatagcaaccgctctttccagcagatttcccaaaaccggctggatcgtcacaatgcgggctcctcccgtcttgctgtggcgcgccctcagggaaaccattccctcccttaaattaatctgtgcccaatccagccttctcacttcttccgggcggatgccggcatacagcatcagcccaaccgcggccaggcacgcccctccgtcatactcttccgcagcagccagcaaccggcgcatttcttccagggacagcacgggaatggaatgctccttcagcctcggcaggtccacatgcgccacagggttttccgtgcaccatccgcgtttcacggccgttccgaaaataccgctgagcaccaaccgggccttatgcctctgcctaagggtatcaaatgatttttccagacaggcgcggcattcccggggcgtgataaagcgtacgggccttcgggctatttccggacaaaacctcaacaaacgccggctgatataacgaaaatcatccctagttcttttcctgcgatcttgccgagcctccatagcctcatccacggctttcctgaacactaccgtttttcctctggcaaccagggcttcctctcccagccggatgcattccctcgccctcttccatcggctgccgcgccccttgctggcttgcagcaattcatgcgccagctgggcggcttccaccacatccaaccctgtcttttttaaaatggccagcgccgcatgatccgtttctgaaatttcctctttcatttcatctattttgcaacggtttcggaatccgtagtcaagtaaaaatagtcgtttattaatcaaaaggttcggcaattccattgatgatgtttcaccgcaccgtcatatcagcagttctcttccaaacagtttgatgacaaagaggacgcaggaattcctatacggattccgaattcgctattcgcaaatgcaggtcttctaaacagaaactggcgggcgctcagaacacgcttgaaatccgcagcgaacaaaccagagcgtcaatctcaacgtatcctacagatcctccccccaacccgcaataactataccgtgccggggcatcctcatcctcggagcgtcatttcccctaaccatcaaccattcattaacaatgatgaaaaaaacaatactcgccgcctgtgccgttctgctggctttaaccaccatctcctgccagaaaagcgacgtggatttatgcctgaacgctcaaaccgaactggtggagaccctgcaaaaaatcaatgaccgggacagcgcggacaaatacgctgacgaagtggacaaactcatgaatcagtttttcaatctgtttaatacaataaacaatacacctgaagaagaaaaactgaaggataaccctcaatggcgtcccttctgggaacaaatgggaaagctgagcaaacggcttcgcgatcagggatattacggctcggaaaaactgcgcaacgctttctcaaaaggaagaggcaaataaacacaacgtcaactgtcaaccattcacaattatgataaaaaaaacaatatctgtcgccggcgccgttctgctggccctggcctccgcctcttgccagaagaacaatacggaacagtatctggacatgcaggaagaaatgatcgaactcatggaaagcatcaaggaccgggacagcgcggacaaatacgccggaaagcttgccgatctccggaagaaatccgaagaactggagaaatccatgcccgacgaagaaaagaagaagctctggaacaaggaggaatacggcaaaatcctgttccggaaggagcccctgaaacaaaccctgttcaaaaaggactattacggatcttatgggctgagaaaagccttatcagacaacgtcttccagccctgattttccatccctccccctctgcattctgcatcaatgaaaatgtttttcatccacgccctgcctgcggcgctgctggcgctggctgcggcctcctgctcccccatcgtggcagaatacacttacagaggctccgtctccggcacaagcagcagaaccggagcccgcatgctgaccttgaaggaatatagggacggcaccgtttcaggcaaattgagcatcccgtcatcttccgccgtggaaccgtattcctgcggaagcattggcggcagggccgacgaccggaggattatcttttacctcacctctctgggggattcctacctcagcgcgaaaatggcggttgcgggcaattccgccggaaccactatcgcctacagaggccatatttccgggaaccgtcgttacctcagcggcaaatggcatgcggccaatgattaccgctcctacctccgcgggggctctttctctttcaacctgacccatatcaacggcagagccgttaccagaaaaacgggaatcaagaaaaacggtacagaaagcccgcccacagaaaagggagaaattccaactttcagcgtagaatccgagggcgctggcagcacgcccaccggctttacggcggagtagccctgcgaaacaataaaacatgctccaacaacaatttccgcacgaattacattaactcttatgatgaaaataacctcttatctcattctgatcccgctcctgctgggaacattctttcttgcctcatgcagaaaggataaagaaaaccaattcattgaagacagaatatccattctggaatctgttgtggacgaagaaagcgcagacgccgccgccttgaaattgatagatatcgacctcaatgaacggaaatacgaaaatgaacatttccgtacgaaagttaatttcaaaaaactcatcaggaaagcggaagaaaagaactattacaactctgaaaaattaaaggaaactcttcggaattaatatctatttaccaatcccgttacgttatgaaccatcatctctattttgccggagcaggcatggcgctcctggcgccattactggcttcctgcgaacaaaaaggccccagcaaaatattacaggcagagattgtcagcgccttggaaaatgtggaagacaaggcaagcgccgatgaagccgcgcagctcatcaacgaggcttacagagaatacaagaaggagaagatagacatggaacaaaaccaaaaacgtctccgcgagcttcgggaacaaatttccgaaaaaaaatattacaattcagaagctttaagaatggttctttagcatctgttcttcctgccggtcgcttcccgcggttttctcatccacaaaacagaaaatgaacggaagggcattcttccttaaaaacaggaaacggttgaattgttcgaaaaactggacatgccaaacggcgcatcttttctgaacagcatcacgaatcctacagagggagaaagaagagtttaccagaaattgcctgaagttgcagccaatcgtttcacccacggaaaaatcaagaatatgctgttcataacagaccgcttcaaacggttgaaataatacacgattcaaaaaagcaaatttgactcaaatacttctcacactgatgaataatcatattcccatgaacgttgcttcttcccgggagaaatgcagggaacgtcattctcagcaagactggcaacaggaaccccagcaagactggcaacaggaacctcagcaggactggcaacaggaacctcagcaggactggcaacaggaacctcagcaggactggcaacaggaaccccagcaggactggccgcaggaaccccagcaggactggccgcaggaaccccagcaagactggccgcaggaaccccagcaagactggccgcaggaaccccagcaggactggcaacaggaaccccagcaggactggccgcaggaacctcagcaggactggcaacaggaaccccagcaggactggccgcaggaaccccagcaggactggccgcaggaaccccagcaggactggcaacaggaaccccagcaggactggcaacaggaaccccagcaggactggcaacaggaaccccagcaggactggcaacaggaaccccagcaggactggccgcaggaaccccagcaagactggccgcaggaagaagattccagcccttcacctctgggaactctctctaaggttcaaaaaaccggccctattgacagagggatcgtgatttccgcatccattgccacgctccttctgattggaggaggagtgctgagctacattttttacgataaaggagaaaaactcatcaaacgggccaatttcttgaaaagtgatatttacgcactcactgacgaaacagcgcttctacggaaaaagtatgatccggtcaggcaaacggcggaaacccttgcccaggcattcaaagaaacagaacagcttcaaacttccctggaagcgaaaaaaaaggaaattgaaaaaatcaggcaggaacatttacctaccctgtcaaagctgaaggatgtccaacaggctattgatgttctggaagagaggaaaaaagcacccaaccccatccataaaccggaaaatcattcaacgccttcccttgcccttcatccctctacttcccctgttcctgacctctcgcccgtaggaccaggtacagttcaagttcccgagccccctccgattatttccgattcccatcttgacaagcaaatggttgagagaggaatagcttacctgaaagcccgccagacaggaaatatcgccagcctttccaaaatgttcgctcctcgcagcaactatatgtacgccaacgggaaagaagtggacaacgaattcattatgaatgatattcagaagttttgggacaaatggcccatccgcgactaccgcttactgaaagttgcttattccggaaacaccattgagctggtttacttttacgaatgctccaattaccggggaaagaccatccgggggtatactaaggaaatatggcagacttcaccctccgggcaaatcatccagtggaatgaagtcctcaatagcagggaagccccggacgccacagccggctaccgatccctcaaaatgaattattagaaacagccgtcatgaaaattctgatcattattgccggcttccttctgtctctgggttcctccggatggttcatccggacttattatggcagggatgtcgaataccggcaggccctggaggcagaaaggagcttatctgaggaaaaagccgaactggcaaaaaaactggccaaagacctgaagaccattgaacaatcgaactctctggaaagcattcgcaccagaatggaatacctgcggcaacaactttcacggcttgatgaagagcgccgggatatcctgaacagcgaagaagaactgcgcctcctggaagaacggctgaaggacctgaagagccaactgtccgagtaaaactttccgggaaacacggtttccagacaaaatatcagtcaatatcaaggaactctgccgttcccgcttgccgccatccttaccatttatgaatacaccacagcaacaaaacaggccggacaccatttcacaggcgaacatggccgctccgccccggcattccatacagggacaaccgaatcccgtcccccaggaaacgcggcgggcgaaccgtcctatgccgccccatcaggaaggagcagccccccacccctcaccatcccggacaccattccccgggacatccgcctcccgtgctacaggaaatcatgccggagccttccctccctcccagggacggccaggacaaacacgcccggcagcaactcagcaatacaaccgccccatgcctccccaacaaggcggccgtccagcccagtccccttattccgggcaacctccgcttcaacagccggggctccgcccgcagggaaacggctcggccccctgccgccaacccgtagtacggcaagcccctccccggcaacaaaacaggccggcgtatcacccttcccagactcccgacaacggtctggacgactacatcggaatgaaccaggcggctaaatccgccgctcccggttttatggagaaggaatttatgcccactttgctggatgcctattccattgccgttaaaaacgccctttccattgttctcgccatcctgctctggatactgactctctggattccgtacatcaacatcggcaccaccatcgccctgtgtacgatgcctcttgcgctgagccggaataagcccatctcccccacctttattttcgacaaacgttaccgccagttcttcggggaatttttcctgaccggcgggctgatgcttgccggcatcctggcaggggccttattttgcggatttccggccatcgtcatcctcatttcctggtcattagcccccatgcttgtgctggacaaaggctgcaatgcctcggaagcgctgacgctcagcaataaatatacctacggcaacaaattcctcatcttcatccttttcctggcccttctggtcagccttggcgttcttctcggtattttgggtttcatcctgggagctattgcagacgccttaggccttatcgccattcttctggcgatcatcctcattccggctacgggcgtaggacttattgccgccatctacaaacggctcgtttaccagaattcctccccctcctgacacactcatccccccggaatgccggagcattccgggcaaccgccctcaaccgtccccatgaattttccctccgtggcctgcctcctgttcctctccgccgcatccccccacgcaacggaaacgcagccggaggcgcaggcgtccgcccggccagccatatcaggcaaaacaggaacaacctccttcaccaccgctctcccgccgtttgcgctgcgttgcgcctggttatggcccttccgaaaagattcggataagaggcagggggcggctcccggcccccaacccgccatacagggaaaaacatgggaggcatgcatggcggaggccagggaaaaactgggacagggcggtggatatgcctgcacgggcaaagcgctggacaatttcatccgggcgttttcccgggatgaacaggaaggcctccggctgcagcccgggaaagcgcggccttccttctgttcttccgccgtttacggcgcgctgctcctggctctggagctctggaactccggcagggggaaaaacggcctggacggaaacgcctggcagaccctggcccccagaaaagccccggacggcacgggggcctggggctgcgccaacgccaacggccccggcctggccgtcctgatccataagttgggagccgggcacagcttcaccgaatgggaaaaagcccgctccggagacatcatgaaactgtggtggacggaagccgtcggcgcgaaggaacgcggccatttgaccatctacctctcccagacggaaaacagcctgaccttctggtcctccaaccagtccaaccctggcggaacgccgggctacgggacaaaaaccatccccaaatcaaccgtcaaacacgtcctctttacccgcattaccaggccggaagctttcgcaaacgctccccatatcggaacggatccatggctgggctccctcctgaaaaaaaacgccacgatggaagaagccctccgccgctgcggcctcaccccgtcaccctcaacaaaaaccatccaaccatgaactatccccccccttctcccacgccccgcttatccatccccgcgctcgtgtggagcggatgctgcgccatcgcaggaatcactcttatcgtctacacctgccagcactacgcccgatggagcaaagccctgcccggttccggggaattgcgcgcccaggtggagcacgcccgtaaaatccgcctgcggcatttttccctgcagctggaatggcaggaaaaatccatcggcatggcgctcacggaacagcaaatggccaaattgaaagaagaaacttcccaaatcaaacgggaaatatggcaagatgaaagcgcctggaataacctcgcagaacagattgaccgtcaacaaaccgtactgctccaggcccaggcggaaatgcagttcgccaaaagcgcgctcagggcggcgggagtcagccagaaagatatagaaaaccgcatttcctccctggagaacgaattacaggaaaaaagccgttgatttatcgaacgccatgaagagattgaccatttactccacccttttccttgccctgtgcctgtccgcctggggcctttcctggtacgccctcactacgctccgcagcgaaacgcgctccatggatcgggaactttccttcttcaatgaacaggaagagcgttatcagaaaaccattccccagcggatagtggatgaaaaacgtttccggcaattcccttccaccatagaaaagttccgggagatggccgtccagcaccggcaaatagccggccgcagacaggctgtggcggacggcgtctttcaaaagtacctggataaaattctggcgtccgcgaaagaaagagaaaaaagaatcatcctgcttcagcaaatcacaaaacagcttgaacaagaagcccagcaattaacccacaaacgataaaataccgccatcttatgaaaaccatcctggcgagcgtctgcctggccttatccttactactcccggcacaggcaacgggatatgatattctcctgccctggttggccccccaagggttaggatttaccttaggcaaggctatccttgattttgcggaagacaaaaaaagatccgaacttgacacgctggtcttggacaaaacccggtcgcttcccgccgatatcccagacgcgttcaacaagatcaccacccctgtagcagcttccttcctggcatacagcaggctgcacaacaaaacggtagatgagaacaattttttctccaggggaattgcctggtcttaccttgtcatccgccttcatcaagctgacaaggacaataatcagacagggtacgttaccggttggtatgctggtgccaatggatccgattatcagacttatggcgcttttgagagcgtatccagggcctttataggacgctggaaccgatccgggaaagacggtccgatggaactccagtggcgccgggtagatcgaaaaggggaggggaagatccacgattcagaaggatacgaacattttattcatgggaaagctgatccggacaatgccaccatctgcggcgactgggaagcgtatagcgaaagactgaaaatacagggcatggagcatcaaaaaggaaccatgcgcatcattcttgaacgacatggtcacggagactattcctttaatatgaacaaggttaaacgttcacgggcatggaatgacgaaaaagttagaaaagccgttaacgatttcaatgctatggcgtttgttttcggcacaaaatacttctcatgcttcttcactcacgaggagcaggaacagcttgtggcttattatgtggataaggcatgggacttctattcagaaaatctcccacccaatattaaatcaaaaaaaggtgatattttaaaatttaaagttaatctgaaacatcaattctattcagataactcatctagtcttgttcctatgcaattctcacgttctactccctggatattaaatatatcaacgggaacatttctcacaaacatggttgaagataaaaaacgatttaagtcaagattgtcactgatcgctcatgaagtattaggacatggaatattttttcgttactccagacgattcattaacaatatcgctaatgaattattaaaggaaaattttaaaacagatatagagattggaggaaacaagcaaacaattaatatatcatcatatccggataaagatggacgcgctaccaaagctattgaagaaggtctagccgttgctgctgaatatgccgtttaccaaaaggaaaaaaagatatgcataagtctctcagatttcatgcaaattcgatatatagattccaatggcatgaaagcagctctttataaattaggcgtagattttctgatgaaaaaaggtattataaataataagggagaactgaattttaaagaaatttactttgaccgtgaatactcaactaaataactgccattttatagatttccatacattgaaaaccccatgaaaaaatcggaaaacttgtcggatgtctttcatcatgttgcctccatcattcaaaaatccctgacgggaggagattctctgacacgagcggaagaaatcatcgccttcatcattgtctcctcactgatagcctttatcttataccttgtagccttttgcaggaaaacgctgaagccgaatgttgaaaatattgctcccatggtcattgtcctgctgatgggaatatgcctggtagtaaccatctacggctacatgacggaaggctttttcccaagcatgactctgttatggatcttcagcggcattaccctcggcataggaaaggccatggggttcttcccggaagaggacacttccgggagcgtcattcaagaaacaatggccgaatggagggcagaggataaatacgcaaattctcttgaaggtaaaagcattgtattcgacgatggcaccagagcaactatccggggcgaagacctggaatcttccatggaaaaatgggggcttcggcttggagcgctcggaatcggtctagccataggagccgccatcatcggaccgcttgcctggatagcatgcgtctggcaggcatttgaggccggatgtattgcctttaatcaaaagcctgaataatcccacgttttatgttgaacatctctataaaaccggaaacagcttcctctgaaaaaagcggctgctctaacaatacccagacctatgctcatggagaaagctatgacggagaactaaagaacggatgccgacatgggaaagggacctaccactttcatgatggctcctgggtcctgggaacatgggagaacgacaacctgtcaggccaagccatcttttaccatgcaacacagcaacggactgaccagggaactttttgcgggacctccagaaaaggccatggaacgatgacatggaaagacggccatatctatgaaggcacatggaacgatacggaagaagggttgcaaggcaagggagtcatgtgctctccagaaggaagaaaagaggagggaaaatggataaacaattcctggaaaagaagcttttcttataaaaattcattttacgacgtcatctatcccattcaaaaacaccctgtttcttccctggtttctttattcattatcctcgcgttgcttatccctggaatagccattgatgtaaagaattgcatttcggatccctatgccatctatctgctcatgggcgactgcttcccatccgcaaaaaacactgccttcgtcaatttggcctaccttctatcaggggtgacgctactcatcatcgccatatacggacctgtctttagacgcatttccgggatccactataatccgctgacaataatattattgtcagcgatgtcccttggcggggccatggggtttcttcaaacatcctacagaggagaagcctattatatcattaccaccatattcagcttttatcttcttattttcctgacaaaattctattataaatccgttcgatttgaatttgcgctcatggcaggcatcctgttttcatggctgtctattttgcttttcaggaattcctattatctttttgaaggcatgcgatggccttatgcgattccgctattgtcggtacttgcctgttttgcattgggccgcatcaaatatgaacagaacggatctttttccaatcacaaatcattgaccctggcgatattgggtattttcataaattcaataatcttacaaccctgtctgaatatggataaaattttatcttctttaaaacatttaccctttttcaattaatggatattctcccttccttctcttttctcatcattgccgccttgtgctggagccggtcatttgccggagacgtccaatctcctccgtccctggaaggggcatcgctggaaattcacgcaagaaaggaagaatataagaatttgcatcatgagatttttctgaatttaaaggacggcctttcctgggaggggagtgaagacaaaatcgttacatacaagcctaaagggaaaaccgctcatatcattgtcgcttattgtgataagcataaagagaatcattcttccggggaaatgtacgaagaggatccatccctgttcagacactattatttatcaggggaacaatcctatgagaaggcaaagggagaaaacccgaagccggccaccatcacgttcacagacaagggaggctattgctattacaaagggattcttcagggctatcttacctgcgatcaaaaacaggaagcggaaaatctcaccgggattccggtaactattatgctggatggagaaaaaactcccgatccggaactgacagctttgctcggccagcttgacagcggaaaacttacggggcgccaagccaactgggtgcgtcaggagctgctcggatattggacggaacggctccataaagcgcattcggccctcatggagcattactcccatgctccagccatagcaaaaaaattgaaggcggcgcagaaggaatgggaaagtttccaggactccctgagagcggcatatgccgcatgtctgacggaagaggatgaaagagaacagaacagccaatggtttctgtttaacatgctccgcctggactgcggtaacaccgagcggcattgccgcactctggaagaactgctggacatcatcaagatgaacggtctctaagcggacgaaaactaccaaccatcaccatattaaatacatatgaatatcgcaaagctattccgcactttttcccagacaggcggagccattaatattattcgagctgcagcattcattcttcttaccattccggcttcagcgcaaataccgccggaggcaaggatgctggaactgacttttcaggaacaggaaaggaaaatcaacgacgcggcttttgccaagtataagccggagctggtcaggctcatgaatgaatgcgtcaaaaacgaggattttgaacaggccaagcatatcaaggatattctcgaacggaaggccctgcccggcattcagaaagaggaaaaagatgactactctcatttcatcgggcaatgggaagaaacggcgggaggatacgtttatttaagccgctttgatgggaagcaggcacagcagaagtccggcaataccggatggctgggcaaaggcggagtggacaaggatttttcatcccctgacatcatcaggctcaatgaaacccggacggtatggttctactgggttaaaacggaccgcgacgaccatattttccaggttaaccacgctaccaaactggtttccctgttaaagcggaagggagcgcgcgagaaagaagcgaatcgctccgccgattcttcatctttcccaaaattcgaccttctttctgagaaaattcatgccgatatggcaaccggcaaggaaaaattgacccggcaatacgctcaggccctgcaaaaaaagagcagggaatggggtgtttccggccatttggaagcggctatctgggcacgcaaacaagccaagggattacaaaagggaaattatgaggagaaacagcaactccaggacatcaccgggacatggggcttcccttcaggcgctgttcaaattaaggatccgaaagaattccggatggaaggagaatgcatgacgttcaagtatctgcgatccttaaatgacagtgtccacctattccatatccaggaaaccaagcagaagaaaatggtagcccggattaacaacctgctcctcattatcccttatgactgccgcgggccattccaggaaggggtgatgaaaccctgatcttttccggaaaagcgcctctcttttacaggaggcccatttcagaaaaaccgtaacccatgcctttcctgaatcagggttaccccaacccgcccccgcccgccgatgatttcaaggccatcagcttgggaagggccgtatattcacggccttttttcatcaggccgccggcgctcaccagattctggagtttctcgtaaatcctcagcctcaggatttcctctccgcccagggacatgtgctttgccttcatcacgacaacggtacgctgaaaaatgtcattgaattccagcatgcccgcttcatgaagaatgagaataagctcatcagtcaccaaatccggtgtcttgcgcgaggaacgtgatctcctatcctccagcatgatgataggatattatcatgacacacttccagccgtcaagttgataaaatttgcgtcattttctgccggcatatgactcaaaaatcttcaaaggtgaaggagccgacagcgaatgaggcctgctccggaaaccggaaatgagttgccgccctttctctccggaggacttacttatccggaagaagaaaagattctctgcaagaaaagggaacagggaacacgtattacctgcagcccgggcagcaatacgaagctttttacagagatgaaaggaaataaacggttcattttcaggttatgtgcagccgcagcgctttttctgaacctttttcccctgcaggccggagaatgcacgctgatgagctataacgtaaagaacggcaccggcatggacggcaggagggattatgaccgcacggctcgggtaatcgcggaggaaaaaccggatgtcgtagcccttcaggagctggaccaggggacaatcaggagcggcggcagggataccctgcaggaattggccacaaggacgacgttgacgggtacctatgccaaggccattgattattcaggcggttcctatggagtaggcattttatccagggaaaagcctttgagcgtcagacggattcctttgcccggcagggaggaggcccgtgtgctgttgatggccgagttcagggattactggttttgcgtcacgcatttgtccctgaccagggaagacagcagcgcttccattgatatgattgccgccctggccgcaaaatgcagcaagcctttttttattgcaggggatttcaatttaacgccggattcggagccgataacccggatgaagaaatatttcatcctgctgagcgatccggcccaaaaaacgtttcccgccgggcatccgaaggaatgcattgattacatctggatgtacaggggaaaaaagacggaggcgttccatgtgaaggaacgcagggtaattgaagctcccgccgcctccgaccaccgcccggttaaagtgacggtcagctattgacatgatgtttccggcccgtcaacgggtagcccgcggggcattgacgccgcccaccagcagcacgatttcccccttgggagggcgttccgcaaattccgccgccagccgggaggccggaccgcgatggtaagtttcaaaggtttttgtcagttccctggctacgcagacgggaatatccggatccagcgccgccagagcctgcacggttttgacgatgcgatggggggattcataaaaaatactggtatgggaagcttccactgccgtttggagcacagcgttttttttcccggatttgacgggcagaaaaccgccgaagaagaatgcgtccgtaggcagcccggaccccaccaatgccgtcaccacggcagatggcccgggaaggacggtgaagcttactcccttttccttgagggtctggatgagacgatagcccggatcgctcacgccaggcatgcccgcatcactgatcacggcaaagctttctccgccagccgcgcgcgccgcaatttccccggcgcgcggctgttcattatggtcatgcatgcttatcagcggtttgcggatttcataatgggaaagcagaagaccggaatggcgggtgtcctcacacgcaatgacatccaccttgcgcagcacgtccagcgcccgcagggtgatgtccgcccggttgccgataggcaccggaacaaaataaacgctgtattccactttctccataagcacaaattttcctgaaccgggcgggattagccattggtaagggtttccgcaatggaagtagccaccagacgggccgcataggaaagggcattcgtgcgggccgactgaatgttgccctggtcaaagaattgacctacttcctccgcagagccggcatacaggatttcctgcgtcctggcgtccaccacacggtatttgacagacaggcgcaatccaagttccgtacttttgtaggtgtcttcccggctggagcgcaactggtcgaaggtgatggagtacacttccccctccacccggatatccgcatccgcgccggagcttaaccggtaggtgccgtcccgctgcagctcatccgccaaggcgccggtcaccagcgtggcggcgcggggctccaaagagttgttggcaaagaggcataccttgacggtctgggccagttccagcttgggcggcttggtgccgccaagctggtagccgcaagaaccggccaggaggcaaaaaacgggcaggaagagtttgaaaacgttccggatacgattcatgaggacggagagttcctgttatctgctggtcacgcgcagttctttcaggcgggccttcgccctggcggcggcggcgggattgatgctgcctttggaggctacttcctggtagcagaagacggcggcatccgcatctttcatcttggtcaggtagtattccgccacttccagctgctgggccaccagctcacgcttcatggccgccagatcggcacgggcggctcccgcacgggcgctgttgggataacgctgaaggtagtcttcatacgcttcctgagcgcgggccacattgacgtggttgcggtctccgtccgcagcagcctggcgatacagggtggctatctggagctgggccgtgggggccaacggagaattggggtaattgtccaccaggttctggtatgcctctatggcctccttcatccggccgcgcgcggccaggtaattgcccagcacgttcatggcctgcggggcggtaggggcatacggggcgttgtcgcgcacatgcttcagccattccgtgacgttcgtgggatccatcctgacatcaaacatccacagcacgcggttggtcagcgcgccgctcgcagcgccgaaggccatttccttctgccgggacatggcctgcctgtacagggggctgtccgggtggcggtcaatgagtttctggtactggtcaaacgcttccgcaggttccttgcgggcctcatagagttccgccattctgaaccgggcctggggagcttccctggaaagggggtgtttttccaccacgcgcctgtatttcttgatggccccggagagatcattcttcgcttcctttgccctggcttcctgcatcagggcaatcgcctgctgatccaccatgcggacggttccgggaggaggaggcgcttccgaagagcattggcacagggccagcgtcccggaaacggcagccatcatgagaaacagttttttcacattcatgattttacagcagaaaaagagggcgcgtcaacccggagaacgcagattgacgcgcaaaaggagttaatggcccttgccgtacacggcttcggcatcaaaaacgacgcctccgtccgcttcacgcagcgtgacggcccccccctggggctgggctttcagttcatcgccgaacggaacggaacggtaaaagcaggagtggtgcccggtgtggcaggctccggcgccgcactggtccaccagcacaatcagggcatcctggtcacagtcaaccaggatttgctttactttttgcacatggccgctggtagcgcccttatgccagatttcctgacggctgcgggaatagtagacggcttcccccagttccatggtcatgcgcagggattccgcattcatataggccagcatcagcggttcatgggtaatatggtccatggcgagggccggaatcaggccgttctggtcaaatttgggggcaaattccacgcctttttccacattcaccttgccgcggtcggcaaagacaatccgggatgagatgtcattttgttccataaccggcccccttagtacatgaaatatccgacatataccaatcttttctgttgccctgacgcaacgaaatgttttcataggagcatatggcatttacggcatcccaagcgttcgatctgctgcgcaccgccttctcccgcaaccggcttccccatgccctgctcatcgtgggagacgagcatcagggagcctcccgcctgatcctgcaactgctggagctgataaacggcatccgggcagaccatctggacagtgtaagggacgagtattgccggctggtgcgccccaagtccaagtcgcgccgcatcctgcgggatgatatccgcgccgtggaaccctttttgcaacagcgcgcggcggaggggaaatggaagatagccgtgttcatggatgcggagcggatgaatgacgaggccgccaacgctttcctgaaaaccctggaggaaccgcccggccagtgtctgctcattttgtccacctcccagccggatcagcttctccagacaattatttcccgctgcgtgcgcgtcaatctgctgcaatccggagaattcaggctcactcctattcaggaggccctgctcccgcactggctggagacctgccgcaatctgaataatgacctggccgctctggccttccgcagcaggttcatggacgtcatggcagaggccaaggccgccatcaccaaaaacctgaatcaggctctgaaagatgaagccagggaagcagcccagggtacggacgcctccgactgggaggcccgcaataaggacgcgaatgccgcccagatagagacggaatatctggaacagcgcaatcaggccctggaactgctcatcagctggttcggccaggcagccctgattgcctccggagccccggaagtcgctccgattcatccggaggtgcgcacactggccgcccagatgcccgtgaacgaattgctgaaacgcatggaggccctcaacaggctccgtgatgatttgaatttcaatattcacgaagccctggccctggatgtccacctgctggcggccgtcgggtcctgctgacgaacaaccccgcctgttaccgtcggccgcgcacggcattggaaaaggcgcagaaggtctctatttttccctttccttccggagcaggggcgccatgatttcctcataggcgcggaatttctgctcatacgtcagccgcgccgccgccggactggtggaaggcatttgaatgacggaaagcgtttcccgaaggaacagttcgggaaaataccgtttaaggtatttatgggaagcggtgccgttgcagcagaccacgccgatgcccgggaagcgatccagcagggccgcaatatcattgggccgttcctgggagatgtgctggtccaggctgccgggcctgacgccggaggccaccacgtcccacagccccaccccgccccggttgagcagggacaggcgttccccatatggcagggagggatcgaaccccagaagggaccccatgattttccagaacgcgttgcggggatgggcataatactgggcctgacgcagggattcgtctcccggcagggaaccgagcaccagcacggaacagtccggggtgacggaaggagggaaggagcattttttcacggcgggaaacggtcagggggtctgcatgccggaatgcctgcgcacttccttcatgcccacttcctgccggagcagggaggacagccacgggtggcttcccacggagggggccaggttgaaccgttccggcctggtgatgcgcgtgaaaatgacgcgcctgatccgggatttgggcaccgtcctggctccgtaaccgtccggaatgttggaggaccagaacgttacctggtcccctccatccttcaccaggacggtcagatggccggattcccggcgcccgatgcggtccgtccagaaaattttcatgaagtcgccgggacgggccttcctccagtcctcaaagttgatgccggctcccagcctgtgcaccaggacggccaggccggggccattggcgttcgcccatccccacggcccttccccgtcatgctggccgaagcgggggatgagggccagccacgcgcgttcggaaataacgggccgcggctgtgcagagtcccatatctgcagggatttcaaaaggagcaggtagcaggcggaggaacagaaggagggcgtggcgttacggagaagaaaaacgggacggcgcgtgcgggggtcccagcggcaggctttctccgcaagggcctgcatggcttccctgctggtttcgtagccgccgccgttccggaactgggaaagtccggtccgcagggcctggtaccaggaagccgcccccgaaggcacggcgctccccctccccgtggaagaaaggtccgcagccgatgctgcggagcacagcaatccaagacagcaaattaatgtcagggcgttcctcatccttgctccgcagggtatacggactgtggaaaatatcaagggcggattgcgtgcggcactgtacgaaaaggaaagaaggccatagccttttccccggaattcctgttgttttgtctggacttatcgcccggcgtcccgtactgtgcgtcaggtcacgcgccgggtatgcggagcggagaggcaacgcaccttgggcggaccttgtttccggcatttatttttaaccaccacggaccacatagaggcatcataccatggcaaaacgcgaagatatccgcaaaatcctcattatcggctcaggccccatcatcatcggccaggcctgcgagttcgactactccggcacccaggcctgcaaggccctccgcgccgaaggttacgacgtcgttctggtgaattccaaccccgccaccatcatgacggaccccggcatggcggaccacacctacattgagcctctgaccgtggaccgcatcacggccgtgattgagaaggaacgcccggatgccctgctgcccaacctaggcggccagacggccctgaacctggcttccaagctgcatgaggaaggcatcctgaaacagtacggagtggaagtcatcggcgtggatctggaagccatcgcccgcggcgaagaccgcatcattttcaaggaaaccatggacaggatcggcgtgccggtcgccaagtccgaacccgtctactccgtggaggaagctgaaaaggtggccgctgaactgggctaccccgtcgtgctgcgccccgcctacaccatgggcggcacgggcggcggcatcgtttacaacgtggaggaactgcgccaggtagtcccccgcggcctggccgcctccctcatcaaccaggtgctggtggaagaatgcgtgctgggatgggaggaactggaactggaagtcgtccgcgacgccaagggacaaaagattactgtttgctttattgagaacgtagatcccatgggcgtgcacaccggagacagcttctgcgtggctcccatgctgaccgttccgcaggaagtgcaggataaacttcaggattattcctaccgcattctggacgccatcggcgttacgggaggcacaaacgtgcagttcgcccacaaccgggaggacaaccgcatcatcgttattgaaatcaacccccgtacatcccgttcctccgccctggcttccaaggccaccggcttccctatcgcctccgtctccaccaagctggcctccggcgtcacgatggacgaacttccctactggcgcaaaggctccctggaaaaatacgaaccttacggcgactatgtggtcgtgaagttcgcacgctgggcctttgaaaaattccccaaggcagccgacaagctgggcacccagatgaaagccgtgggagaagtaatgagcatcgggcagaatttcaaggaagctttccagaaggccgtgcgctctctggaaatcggacgtgccggcctgggccgtgtgaaaaagctggaagccctctccaccccggaattgcgtgaaaaaatcacgtacggcaacagcgaacgcttcttccagatttacgaactcctgcgccgcggcgtagccgtggaggaaatcgtgaagctgacccgcatcactccgtatttcattgaacagatgaaggaactggcggactttgacttttccctggatgggcaggactgggattccctttccgcggaaaccctgcgccaggccaaggaaatgggcttttccgacaaatacctggcccagattttcggggtgccggaaaaggccgtccgcgcccgccggcagaaagacggcatcacggccaccttccgaatcgtgcccgtcagcggcgtggaacacgcggaatactactactccacttacagcggcgcggcggacgaagttcccgtgaacgacaagaagaaaatcatgattctgggcggcggtcccaaccgcatcggccagggcatcgaattcgactatacctgcgtgcatgccgccttcaccctgcgcgaccacgggtatgaatccatcatggtgaactgcaacccggaaacggtttctacggactttgacacggccaacaagctgtactttgaacccgtgaccgtggaagacgtgctggctatttacgagaaagaaaagccggaaggcgtcatcgtccagttcggaggccagaccccgcttaacatcgcccaggccctcaaagacgccggcgtaaaaatcatgggaacccaaccggaaggcatccgtctggcggaagaccgcgaatatttccgtgaacgcatgatcgccctgaatatccgccagccggaaagcggcacggcccgttccctggaggaggccgtggaactggggcgccgcatcggctacccggtcatggtgcgcccctcctttgtgctgggcggccgcggcatggaagtcatttacgatgaagaaaacctgaagcgctacggcgtggaggccatccaggtcagcccggaatatcccatgctgatcgatcgttttctggacaatgccattgaggcggaagtggatgctctggccgacggcacggatacttttgtagccacggtcatggaacacattgaactggccggcatccattccggcgactccgcctgcgccatcccccccgtgacaatcgctcccaagcacatccgcaccattgaggaacatgccgccaaaattgcccaggacttccaggtaaagggcattctgaacgtgcagttcgccatctgcaacgatgaggtttacatcattgaggccaatccccgcgcctcccgcacggtgccgatcgtctccaaggtaacgggcatctccctggcgcgctacgccacggaaatcatgctgggcaagaaactcaaggagctgggcctgaagtcgcgcgcctgccgtttcatcggcgtgaaggaagctgtcttccccttcaacatgttcccggaagtggaccccgtactggggccggaaatgcgcgccacgggtgaagtcatgggcattgcggacaacttcggcatggcctactacaaggcccaggaagctgcgggctgcattctgcctacctccggcaaggtgctcgtcacggtttccgaccgggataagaagttcatcgaacccatcgcccgggacctgatttccctgggctttacgattatctccaccggcggcaccgcagaatacctgcgcggccagggcgtggaaacggaagtagtcaacaagctgcatgaaggccgcccgaacctgggcgacatgatcaccaacaagcagatcgacctgattatcaacactccggtggaccgcaccagtatgattgacgactccttcatccgcatgcagtccatccagaagaaaaattccgtacatgactaccatcgcagccgccagggccacggtggagggcatccgctccgcccagcacgtgaaggtatcaccccgttccctccaggaataccattcctgaacgggaaatactccggctatttcaataaaaccccgcatgcctgaaacgcatgcggggttttattcatcatccggcagacggaggatgtgaatctcaaaaatcgcccgtccgcagattacctacttgccgcactaatgcagatcaagcccttgctatctctgcgcaaatcaatgtggcattatcctggttgggcgcgccgtcgcggttaatgccgtccagcacggaacgcaccagttcctccgcggaaagcatggacaaataccgcatccctgccggccccagggaatccagataaggccccactccgtcactggcgaccaaaacacggtcccccggaaataagggaaagcattcctcccgcaaatccaccaaaggaacttccttccccatcagggcagaagtcagggaatggcgggcaggatggctcaaagcctcctcccggctgatgatcccttcatccgccatgcgctccaattccgcggaatactggtgcagctcattaagcagaaacattttctcttcccggataagcagcagaagggagtcccccacgctgacccacctcagcccatccgcccctatccaggctgctaccagcgtcgtccccatctcgtcatcctcccctcttttcttccgggcggaccatacctgttcatttgcggcggtcactgcagctttcattctctctccgggcaaaccggatttctgctcaaaagcccgcgaacagccttccaccgccgcgcggctggccaactctccgccggtatacccacccatgccgtccgccagcaccagtaccaatgcgtcctctccagccagaatggagaaagaatcctgttggttactgcgggcgcccagaatctggtccccatgcaatccggaaaccagaaaaggctcttgggaaaaagtctgatgcatcatggcagtaaataatcgtaacatggatggcctgccttaataaagcaagaatagcgagagaaaatagccatgcctgaagccgcggaatgattatttccagaggaatggaaacgtcagcctgcatggctggaaaaacgcgaagggaacgccccggcagaaagaacccatgcaaaaccggaatgataagcggaaaaacagccattgaatgccccaaccctcaagcgctcccagcgctctccggagtgttgcgccagggaacactttccgcccaggaagaagaaaggaaagtttttactggcggcaggaaaaataattctctactatattttctgattttttattccatgagccttcattccgccccctccatcgtttgggaactttccggagagccctgtgaaacgcgggatcaagccctgtccggcattaaaaataacacggaagctttcattatctgcagccgcggtgacgaattcctccaggccacctgcaatagtccggaaaattaccattgcgaaatttcgtttgccagcggaaaggacagtgagctttacatgacgcccaaagacctggactactctcggctccatgaccttttttcacgctatgcggcaggggaggatctttcccatctcaaaaaggagtggactcttgatgcccacaaacccggctatattaccgccatcgttgtcgttctggcaatcattgccgtccttgccgtcatcatcttcagttcctgaaccgaaagaggcctttccttttccggaggccatgcatgaacaccgcatcctcagcacttccctagatacaccacagtttcattcggaaccgtaacgcgtccttccgtttcaaaccggtcaaacagcttttccagggcgtccagccaggaggaccgctcttctccgccctccgtcaaggcataggaggtggacatcatgcggcggagatactgctcccgcgtgtaggacaaatcatttggaaagcggaatatctggaaacggtggttgaaaaacgctccaatgctgtccgtcaacttcgccagccctccgctgaatccataaaaacacggacagtaaagacggtggatatttccttcctcccgggcaatgggactgtcttccaccctggagttccaaatcagggcaaccttgcctcctccggacagaatacggcggcattccctcttgaacgcggcggcgtcaaaccagtggaatgactgcgccgccgtcaccagatccaccgaagctccgggaagcccggtccgctccgccgttcccgccacggaatgaaaacggggaaaagcggacagccgtttctccgcttccttccgcatgtcatcattgggctccacgccatacacggtccagccgcgctccagcatggcgcgggaaagaatgcccgttccggaacctatatccgccagacggggattctcccggcggctctcccgcgtcagaagcccaacaacggaggcgggataatcgggtctgccctgggcataagcccgggcttttccagtaaatcggtcagtattattcattagttttcagggtatggtttactccttttctcccgctgttccagcctcaatgccgtacccggctcaagaaaagccgccatgctgcgggagcccgggaaaaaacggatttgcccggtggccgtcatgcagaaaggcatgcgggaaagattgcgttccttgcccattccccggcaacatggacggagcagtccctacagatggctttacaagtccttcatgaacttttagtatccggctcaggcccgcctttcccggattgtgtcctgactacgggaaaaacgaacatctgcgggttccatttttcagactgcgccgcccatgttcggatattacagacttgcctccgccgtcccccagctccgcgtggctgaagtggactacaatgtcgaccaacttacggagggattccggaaagccgcagaacagcaggcggcggccgtcgttttcccggaactgtgcattacgggctattcctgcggagaccttttcttccagccgaacctgaggaaagcagccctgaacggcctgctccgctttacagaagccacggaaggctccggcacgattgccgtggtgggcctgcccttccttcatgaagacgctctgtataatacggcggcggtagtgcagtccggccgcattctggctctggtgcccaaaaccgtgctccccaactaccgggaattctacgaaaagcggcaattcacctccggcagggaattgggtacaggagtgaaggaagtcacaatcaatggggtgcatatcccgttcggggaggaaatcgtttttcatgaagaatcgtctcccttcagttttggcgtggaaatatgcgaagacctgtggagcgtcattcctcccagttccaaactggctcttctgggtgccagagccattctcaacccttccgcaggaacggaactcaccggtaaggccgcatacaggagggaactggtcagacagcagagcggcagatgcctctgcgcctatgtcctttcctccgcaggtgtgcatgaatccaccacagacaccgtattcggcggccattccctcattgcggacaacggcaggccagcagcggagggggaacggttctgcagggaaagcaccctcatctttgcggacgtggattttgaacggctggaggcggcgcgcctctctgaaagctccttcaatgatagcaaattctttttccctgccgggaatgccctgcatctggccctgccggaacaggttcccggagcgcccggcctggaatacgcattcaacccggcacggccctttctgccttctccgtcccgccgccgggaacggtgtgaggaaatcatctccatccaaacggcaggtctggccaaaagaatggaacatacccgcgcgcaacggctcgtcatcggcatctccggcgggctggactccacgctggctctgctcatctgctcccgcgcctgccgtgcgctgaagcgccctgcctcggacattctggccgtgacaatgcccggtttcggcaccacggacagaacccatgacaatgccgtaaccatgtgccgccttctgggcgtggaacttcgtgaaatccccatctcggaatgctgcctccggcacttcgccgacatcgggcacgatcctgccgaacgaaccaccacttatgaaaacgtccaagcccgcgaacgcacgcaaattctgatggatttggccaataaaaccggggggctggtcgtgggaacaggggacttgtcggaaattgccctgggatggagcacctacaatggggaccacatgtccatgtacgcggtcaactgctccattccaaaaacgctgatacgctgcctcattgaacacatcgcggaagaatcatccccggaactggcagccaccctcacggacatcaacaacactcccgtcagcccggaactcctgccgccgtcggacgacggcaccattgaacagaaaacggaagatgtgcttgggccttacgacctgcacgactttttcctcttccacttcattaaatacggtgcggaaccggataaaatcctgcacctggcggaacatgccttccgcggcgaatttcagccggacttcatccgccgctgcctcggcatcttcatccgccgtttcttccgtcagcaattcaagcgcagctgcatgccggacggccccaaagtgggcaccatttctctttccccacgcggggactggcgcatgccttccgacgcctgcgggaccgtgtgggaaaaagccatctcccactactgagacctcctatccggaaagttacggagacggcttttcccgaaacccggcaaggatgccgaagaccgcatcaatgcccgggggccaacttcagcccgataatgcctatcagcaggaaggatgccgccagcatgcgccagatattggaagaatccccgaaccacagaataccaaccaggaacgtgcccaacgcgccaatgccggtccataccgcataagcggtgccgatggggatgttccgctgggcaagccacaaaagaaaaccgctcagaaccatgctgaaaacggagcaggcgatacaggcggcgaatttgccgggccctgtgccgggcgtttgagaaagtttgaaacccagaggccatccgatctcgcagagaccggccaacaccagataaatccaggacatatattgaaacggggaatcaccttccgctcaccggccttcccaaatgggaaaagctccaagggcaacggatgccttgcataatatccgcaagcgttctggaatcaagaaggtaaatcttccacaccctgtcatacagaacaacacaggcatccgggtcggaatcccgcctctgtcctgtacaaattccatcgtggtacctgttacaggcaatctgacaaacggaaaaccgctacttcatgaagaaagctcttctaatgacaaaataatattgtttgacgcttctgtttacatgctccccgccatctgcctttaccccggcctgccggcccggcatctccgtattcagggataatcacggaccagcatcaaaaccggaaccgttacgacaacggcgcttatcacaaacaaaaaaggagcgggaaaagctgtttcccaaagtccctttctatttaagtttcctgccgggagccagccctgtgtcttctccgtccgtcagccattccatggtaatgggaacaaacttcagctttttaatatgctcctggttctcctcataaagcaccccaacgatgccgggttccaccatggcaaggctggaataggcaaaaccgccctcgcccagcaatttcttcaccggccaggtcttgccgttgtcatagctcatggccacctgtcccttaatgcgccggcccgcactgggcccggaaaacagaatgcggcttttgccgccataggcaggctggtcgctcagggaatacgtcatcagggaattctgggtactgtcgcaaaacagctccggagcgtcctccacctgtccccaggtctccccgccatcctgggaccacgcaatacggcggcaattgcctgcgccccaatggcgcgcaaccatcacaacgccgccgttatccgtttccgcaatggacgtctcgttcaccatgcccttcatattggcagtcggctggcccagcttccagctcttgccgccgtcatcgctgtaaatgcaggaaatcacccatttgccgaacggcccttcattcatcggaatcaccaggcggcccttgtgggcgccgctcttcagctgggttcccgcattcgggccggacgccataatatccactcctgaagaacgcttggtcgtcttcgtgatctcctgcggcttcgtccaggaagaacctccgttcctgctctgaatcataaaattgcggatgcacttttcatcatcccatccgtccgggatattgggctgccgctccttgaccccggcagggtaacgctggaatacgacagtcacggtcctggttttggcgtcataaacggggcacggattattaaacgtggcgccatgggccttggcaatcgcccggggacgggaccaggtcttcccgccattcttgctgacgctcatgataatatcgttttccccctggtcggtatttttgtaccgtccttcggcgaatgccaggagctggcccttgccgatactgagcagggcgggaatacggatggacgcatagggattaccctccccggcgttgaatacggtcacagccctgtccgtagggaaatcggttttctcttcctgcccgaacaccggcaatgccacggcgcatacggcactcatcaaacatttgaatacggaattcatcatcctcttcaccttattccattttcccctgccgcacaacaaccatgtcatgcatgtgcgccaagaccagaggaaaaggagcataaagaggaacgcgcggcaggaacgcgataccgccgccgggaaacccggaaggcttcggcccaaaattcaagccagcaagaaacgtgcccatccgaatacggagccccggaaaagcgcccgccggaaccggggaaaatatccggaaacgcgaaatcggctgaaaaaatccctgccgaaccgccaaagccattccacacatcaaccgcccggcctctctccggacaaaccgcttgcctatttattcatcaagagaaaaatggtgaaagaagaagaaaacggaacctgtatcttgtaacatcgcagaatcacctgcttcccgtactgtcatgaaccgaatccttccattactatcccttcccctgctgtcgctcgcagcggtatttgccgccaacacgccggaacacatcggcaacgacctcaaactgttcaaagactcctcctgcacctctctgaagccggatgtgaaagacacctccgccttccagtctgacgcgctgaaagaactcgcggacaaaatcctggctggccattacaagccggactacctgtatgccgaataccgggccctcccctcaccaagccagacggggaaaaatctcagaatcggcgacggattcagcaagtacgacaacatgacgggcgtctatctggaaaaggggcggcatgtcgtcctggtcggcaagacggaggggcaggaaatcagcctcctgctgccaaacctgatgcgcaagccggccgaaggagtgcagcccacaaaagaccccaacggctggggattgcacaaaaagcagattccgctcaaggaaggaatcaacatcattgacgtggaaacgcccgccaacgcctatatcagctatttcaccgaagacgccggcaaggcgccgaaaatccccgtccatttcgtaaccggcaaagccaacggttactttgacaccacccggggcgacaccaacaaggactgggttcgcctgcttgaccaggccgtctctccgatcatggatgcccggggaaaatacatccaggttgcctaccccgtaaaattcctgaaaaaattcaccaaagaccgcggaaccgaactcatcaactcctatgacaagctcatcggcatccaataccagctgatgggcctggataaatacggcaaaatcccggaaaaccgcgtcctggcccgcgtgaacttcaactactacatgttccgcgacggagacggagtcgcctacctcggaaacgacgggacaatgcgcatggtaaccgaccctgaaaacgttctcaagggcgatgcctgctggggattctcccacgaagtaggccacgtcatgcaaatgcgcccgatgacctggggcggcatgacggaagtcagcaacaacatcttttccctgcaggccgcagccaaaacaggcaatgaaagccgcctgaagcgccagggcagctacgacaaagcgcgcaaggaaatcatcgaaggggaaatcgcctacctgcaatctaaggacgttttcaacaagctggttcccctgtggcagctccatctttactttaccaaaaacggacaccccgacttctatcctgacgtcatggagtacctgcgcaacaacgcgggaaactacggagggaacgacaccgtcaaataccagttcgaattcgtcaaggcatgctgtgatgtcacaaaaaccgacctgacagacttctttgagaaatggggattcttcaaacccggaaaattccacatcggcgactatgcccagtacgactttaacgtcacccccgaaatggcggcggaaacaaaaaaatggattgccggcaaaggctacccgaaacctgaaaccgacatcaccgaactaagcgagtaatgtgattcggcaatcccgacgattacctttaatcatcaaatatgctgcaaacggataagaaaaacaggggctcaagttcaattcttttgaaagtatttttgatgatggaagattattaagaagttaaactccctcaccaaagggtggaatctttgctgattccaccctttttcatttctacatccatccttctatccccagccatactgggtacggcaaaaggcatggtaccccaagattaaatgtattcccccatttgatagcctatccaggaattgatataattggcataagtctccttttgatcaaacatccaaacaggaaacaaaaaaggatacttttcgatgaatcagtttgggctggttggttttccgtataacgccaggtggataacgtatttccctgatagtcgcaaatgaagagggcatttcccttgagtatggaaacaacctcagaagagaatcccagcagttttccttttttgggagaacaggatgcgtccttcagggaatattgcgcggatatgtgttccttgttggtatgcgattccgtatcataaatccaccatgtcgtgaaacattgggtttacacacagcaaaacgcaatgataatcagttattttttaccgccaaaaacaggttagttgacaaaatatgtttaatagtattttctaataaatgttatgggaagaaaaccgtcaacatcaaaagagatcttagaaaaatggcaagcctctctgaaagagaaaacccataaaggggcattaatactagatgcttttatacaaaaagtaggattaagtgggagactatcaattgatggaattagaagagtttttcacgaaagaaatccagataaaaaaatagatcatcttggttctttgactgggaatacatctgagaaatcaaaacaaggaaatacatatgcaattcgtccattcaaatatataaaagataggtatgaaattcatgagaatatacagcatattttaaaaaaaataaattgggtcagagaaaaatactcagaaaaagaaactgaacctattactaaaaaaccttttattcccaaaagtcttaggcggcagatagaagcacgaagaggacagccagaattcagaaaaaatcttcttaaggcatataagtataaatgcgcaattactgggtgtgacgcagaggaagctctagaagctgctcatattgttccttattctgaagaagaaaactacgacttagaaaacggcctcttgttaagagctgatatacacacgctttttgatctgcgattaattaatatcaaagaaaagaattccattttttctgtttctttagatccattcttacaaggcaaaattccatatgataccttagatggtaaagaaataaaattgggagaaaatgtagatactcataatttttccattaatcttgaacggagatataatattgataaatgaaaattctaatctccttttaccagattggaaattgtttgaacaaccatatctccaattgttttattctacttggaagccttggtttccatttatcatagagttcaggagacaatttcacagtcaaaatcaaagcggcatctacttctacgccagtttaaccatcctccaatctaatgctcttctctatgtcgacaatagtcctgaattccaatgacatggggatttgatgctaaatgacggctcaaggctcggtttttatctggacggcattaccgctgcgacattggagaatcacggttcaggtacatattccaatatttccgtgaccaacacattgaatttgaatggaacagtgaatgccgaagtagaagtaggcttaggtattttagccgcagggatggaagcgtttactctggatcttatcaaaacggaagaaacggtttccggtaatggtgattttgtcctttccctgaatgatgaaaaccacctcctgaaggaaggcagtcttctatgggattctactacaggcatactcagtttcacaggacaggtggacaaagccgtagcggccgctctggtcggcaaggacggctccaatatcgccaattccctgtggtcaagtaccagcgtcgtcaaaagcttcggtcaaacggctgtttctcaattcaaggttacccaaccgggagattccaatgtatgggtaagcggtttgggcgatttcgttaccatgaacgccacttcccatgcggacggtttccagtacaacggaggagggtatgcggcagggatcgactacgcctggacgaagaaattccgtgccggtatcgcctttggtcaaacattcggaacgttcaaatccgacgatgaccaggcatccatcaagcaggatagcatcatgaccggtctttatgccaattaccttgaaatattgtgcgacaagcagagtttgggattgagcggatacttcgcctatggttcggtggaaaacagggccaacactttcgttggtaattctgcctatctgcccggtcaggcaaaatggaatgacgacgtgttctcctttggtcttaaagcagactggaacatcaaagtcaccgacaagacaacgctgacgccgttcattgggattgattacgtccatggagcacaggaaaacttcacggaaacatacgacaatggaagccgccagtataggggacggcaacatgcaggtatggagtgttccggtaggcattacggtcaaaaaggaagtatcggtaggaggcggacagcttcttctcccagaactgacgctcgcctatgtcggggatgtctccagaacgaatccttcggtcaaatccaccatctacggaatcgataacaaacacaaaggcagcaattcgggcagaagcgctttaatgctgaacgccggaaccaactgggttattaaccagaactggagcgttggagcattctacactctggaagccagaagcagccaggtgaaccaatctgcctcactttcggcaaggtacagcttctaattagacaaataacagtcacccaaggatggaatcagcaatggttccatcctttttcatttttacgccaatacactattcctttccatactgggtacggcaaatggtacagtacccccgttagatcaaacgagctcccccaattggtaactcatccctgtttgatctcaatatatacaaggagactcccacacaaagggggtactttctcaaatgcttcggaaatgtttttctcaaaaaatgaaaactttttctccattaggaaatgtaccaacaggaaaaagaggaaagtccatttagccctttgtaaggcaaaattattttttacggtaattttttagatttacgtaggttaatacccatcacacctctggaatccttacaaatgatcctggagacattcagaataaattaccctccacggacaaggaaaacaacgtacaattgagcgaaaactcagcacaatccttctatggaaattttgtacgaagccatttttaattaaacatttccttgtacctactaaaactatactcatctcttagaatcaaagggatatagctccattaattctaaattgaatcctacgggaattattcaggaaggaaggtaattggtaaggggaactggttacaaatccgtacaatcaattctggggatattcagaataaaataacctgcgtatagatgattctccgtatactgcaatctgcatttctcaaaacatgtgtttcccaaatgatcctgtactatggagtaatggagagtgataaaagattatgaaaacgtgtttaaaatttaaaaatatattgtaatgagtaagttgtgaaaaatatggtctcatacaatgtatattaaaaataaaggagagagttttcaaatgtatacttctgtatacctagtatttctttcaggaaaaaattataaaaattcataatttgatggaaataaataagttatgacaaaaaacaccccgttcaatgtgtgaatataataaatgggaaaaatttccaaatgaatgattatgtatgaccagattccaggactttcaagggcaatcagctttgtacgaaggtgtttttaattaaaataattctaaataattaattctaaaatgatttctatgaaaattattcaggatatagaggaatggttacagagagagtagggaaagcttccagagagattgagaacaaaaatagtcaactatggacaatcattcaaaagaagaaaaattctgattggaacagattttggggctatattcctaatccagataatcttcatgaagtcggagaatgcacggaggattggcatgattatgaatggggaaaggaacagaaggagaaagaattgagaaagtggaccgaaaacgatttgtcaaagagacaagccgtacataagatcaaatatctcaagaatctctaatttacgatgccttcaacttgagaatactccaaccttaacttataattaggtgtgtaattcatagacgcctccatgttttatccacccacttgagatatccagtctcgaatatttgtcccaattctttctatatcccgacgtcctaattccccactatgcatgataacattacgagatctttccaaagtagtaaaaatctgtttggcccaatccaatgatataatgtgatcttggaaaagttctaaattttgagacattattgaagctaaatcaccaaattcggtataatttataaagttatcacctcgtggggaatgccattttattttcccttcttctattttccgtgattcagcttttgtccttattttttctgagacagattccatccaccaattttcacctttattttcgataagaattttaactacaaattgtctcaccatgttttcaaaacatgctatagctgtataaacagtagccatctgctttgcacaatttaataattcattctcgagaagatctaaggacaagcttcgtatatattcttgtgttaatatatctgaagatgaatgcttgcttatagcttcggaattagaaagagagatttttgttaattcccctctcattacgaaagaatataatttatctggcattagattaaaataaatgttttttcagactttggaatatagcatcatacactgccatattacttgtttcaggaagatgaatttgtatattataatgcaaattcatctttgttgatggttcagaaatttggtttatttttggatcctgttgaacggaaatattaccttcaatattagcttcgtgtttttctatgtgtttttgtttagaaggaattttaatttgagaaatagttggtgtccaatctgcataaccgcataatgctctaaaagttgttgacatcatttcaataactctatctcccttttggccttgcgttaaagttcttaatttatttttaatttcatcattactcatggattgggcatccttctttaaattaaaaagatcctcatatgcctcttgaattcctattgctatgatttttttagattgcgtttgatcgagaaaatcataataccgttgcgtgggttgtccggattcgttgagcaatcctaaagcttttaacattcctataattaatctgtcagtactacttttgaatcctaaatcttctaaaaatttagtcgtaaatctttctggagcttttgctccaataatagaattgaaaatagattcaagatttttagtggatgatagatatgatgtagttaaagccataacgtggtactaaatacacatttttctttcctgaggcaatattttctccaaattatatacattaatttcccccatttcttccccatactcctgcaaacacaaaccgcaatatactcattacgaatatattgcggcggaaaattaatggcggacagggagggattcgaaccctcggtaccggtttgcggtacacacactttccaggcgtgctcattcgaccactctgacacctgcccgttggagattgtgctagataggaaagcagggatagaataacggcagaagggaggtttggcaatctttttttcatccggaagggattttccgttttccccgagttttttcacgtttccggctgttgctcgaaaaggatgaaaagagcctcggcagcgcgaggaaatcttcaacgggcataaacaacaacgaagcgtattttcagaagttttgaaaggaacaggtttccgtggttcacaaaaattatccatgagggcatggcagattttcgccctccctgccctgtttttcccgcggagcaaataagaatttttctctttctccacctttacggcttccgggcaatcgggcaaggttcaggtaagaacctctattgataagcttgcttccatctgggctctaggattgacctgcagccgtttgagaagtttcaggagcgagacgggaagagaagactgaaggattccgcgagttccgggaaaacgcggcagaaatgggaatccacactgtaagaagagaaggcagaacatgccgtttcaccgcgtatcatcatttccgcggctccgcattccttccgtcctcaaaaaaggccaaaggcttccggcatgtgccggaaaaggcgtttcccgaccacacttcccccttgacggatgccccaaagacgggtttgctagtcctgcgcatgggagagtccttttacacacgcaccacggaggccccctcctccgcttttgatttgtccctcagaccgcccgctttcagcgagttctgcggccaggagaagattaaggaccgcctgatgctgatggtggaagccgccagacagcgcgacgacgtgctggatcacatcctgttgagcggtcccccgggcctggggaagacgacgcttgccaatattatcgcgaatgccgtcggctgccgcattcatacgacttccggcccccagattgaaaaggcgggagacctggccggcgtgctgaccaatctggaaaagggggatattctgtttattgacgagatccaccgcctgcacccggccattgaggagtatctgtacccggccatggaggatttccggctggatattatcatcgaccaggggccgaacgcccgctccatccagctcaacctgcccaagttcaccctggtgggggccaccacccgcgccgggatgctgaccagcccgctgcgttcccgcttcggcctggtgaaccgactggattattatacgcgggaggagctgtgcgccattatcgaacggtccgcggggctgctgaacgtgcccgtggacccggagggcgccctgcagatcgcgctgcgctcccgcggcacgccccgcgtggccaattccctgctgcgctgggtgcgggattacgcccaggtgcgcggcgacggcgtgattacggagcagttggcgcacgacgccctgaccatgattgagattgacgacgacggcctggacgagatggacaagcgcctgctggaagcgatgatttacaaattcaacggcggcccggtgggcctttcctccctggcggtggccgtaggggaggacgcttccacgctggaggacgtgcacgagcctttcctgattatgcaggggtatatcagccgcacccccagggggcgcgtggcgatgccttccgcctatctcaagatgggagccgcgccgcccgccaacggccaggggtggctgttgtaggccattcatttacggcatggaaggagtcctgcgttttgtgctggtcatcaggcccgctttcttttagactgtttccacataaaacgtcaggacgttttctgttcatcatacgcccaaagctatggccgcacattctgatactccctttaaaagactgcccgtcaagattatcggtacgggttcctatgttccggaacgccgcctgaccaatgcggatctggaaaagatggtggacacttcccacgaatggattattgaacgcacgggcattgtggaacgccgcatcgccgcccctgacgagtacacttcccatatggggacgaaggccgcccagcgcgctctggaatcctgcgggctgaagccggaggatattgacctgattatcgtcgccaccatcacgccggatacgttcaccccttccacttcctgctatatccaggatgccctgggcgccaagaatgccgccgcctttgacatttccgccgcctgctccggcttcctgttcgccatgaagaccgccgtccagtacatcggcaccggccagatgaagacggcgctcatcatcgccgcggaaaaactttccaccgtcgtcaactgggaggaccgcagcacctgcgtcctgttcggggacggcgccggagcagccgtgctccaggcctccacaggggaagagggggaaggctccgtccttgccacggatatcggttcggacggctccctgcatgacctgctccagattccgggcggcggctcccgttgccccaccactgcggaaaacgcccatgaacgcctggccaccctggccatgcgcggcaatgaaaccttccgccatgccgtcacgcgcatgaaggcctccgccgccagcgtcattgaacgcgccggcctcacggcggacgatattcagctgattattccccaccaggccaacctccgcatcattaacgccgtagcgcagcgcctctccattcctgaagagaaggtgttcgtgaacattgagaagtacggcaacacgtccgcggccgccgtcgccatcgcctttgacgaagcgcgccgttccggcagattcggcaagggagacaatgtcgtcctggtcacgttcggcgccgggcttacctggtccgccgccgttatccgctggtaatattctttttcatactccctccatcatcatgaccactgaaccatacggcaaaaaaaatccgtttcccgctcccgtcctctccgtcaagcacatcaccggggaaggcagtcccaaggaaaccatccacattgaatacagcctggacggttccgggatgaattacattgccggggatgccctggccgtcattcccgccaatgatccggccctggcggacgctctgattgacaagctcggcctcagcccggattcccaggttcccacgccggaaggggaaaccgcaagcctgaaggacgccctggttcactgctatgacattaccaatgtcaacaaagccctgctgaccaaatgggccgccgcctccggcagccaggagctggacgcgcttctggccggggataaagacgccctcaacgatttcctgtggggccgggacatgctggatctggccacggaatatcccgcttccttcaaatccgcggaagctttcaccggcattctgaaaaagatcatgccgcgcctttattccatcgcctccagcccgaacgcccatcccgaacaggttcatctgtgcgtgggcgcggtgcgctacacggcccgtgaccgcaagcgcggcggcgtctgttccacctacatggcggaccgcctccagccaggccatacggccagggtattcgtacataccaacaagaatttccgtctgccggaagacggggacactcccatcatcatggtaggccccggcaccggcatcgcccccttccgggcattctgggaggaacgcatcgcctccggcgccaagggcggcaactggctgttcttcggcaatccgtacagggctactgatttctgttatgaagacgagctgacccaattgaccggcaccggcaaactgaagttgtccgtggcctggtcccgcgaccaggaaaagaaggtgtatgtgcagcacctcatggttcaggaaggcgaagagctctggaaatggctggaagccggcgcctgcttctacgtctgcggggacgcctcccgcatggcgaaggacgtggacaacgcccttcatgaaatcatccagacctggggccataaaactccggaggaagccgcggcatatgtggcggacatgaaacagcaccgccgttaccagcgggacgtgtattgatttggcccatgcccaagccttctaactccttccattatgcgaaggagtttttttgtcgctcctttatttattttttgatatttccctgtttttctttcgccaataatcatttctcctgaccggatttgtttccccaatatgccgattcagctttaacatgccaaaatcccgcgtccaaaagagcattctgaatgcccgtgtcagttttattttttatattctcacactggcatgcacgtttttttcgcgcactattttcctgaaatcgcttggaagcaatttcctggggctggtcggcaccctgcagaatattctgggattgatgaatctggctgaactcggcctaggggcagccatttcgtttgcgctttataaaccattgcaggagaacaggaaaaacgccatcagcgatattatctccttatttggatttttttacaaaaaaataggggcgtttgtttttggcgcagctattatcctcagcgcgttttttcctctgatcttccggaacagccctatttcctacggcgttgtttacagcgccttttacgcattcctgatttcatctctgctcagttattttgtcaattacacgcaaatcctgtttgttgccgaccaaaaaaattatctggtcgcagcctatttccagacagccaatattctcaaaatactgcttcaaatggctctggcccggaaatacggcaatccgtacatctggattgccgtcgaattagctttcggcattttatactcgctgacattaagatggaaagtgcgccgggtttatccctggctaaagacatgcaccagaaacggcgcggccctcaaacgtcaatatcccgatatcctgatccgcactaaacaggtttttatccacaagatcaaggatttcctgttaatgcaaagcgaccagattttcgtctttgccttcgattctctttccatggttgcctattacggcaactatactctcatcaccacccgcattacggggctgttcaccactaccatggacagcatcacggccgggatcgggaacctgattgcagagggaaaccggcaaaaaatattgtccgtattctgggaactgatggctttccggtattttctggccggcatcatcgtcttttgctgctaccatctcatcaactctttcatttcgttgtggctgggcagtgagtacattttggaaaaattccattgtggttctgctgatgatttacgtatttatcatgattacccgcggcacggtggatatgttcaatacggctttcggtttgtatgcagacacatgggccgcctggacggaagtcatcctcaatgtaggcattaccctctcaacagccttttatctgggtatcaacggcattctcctgggcaagattatcagcacatcgcttatcatcgccctatggaaaccctattatcttttttcccggggattgcgggcttcttacctgctgtattgagaaaaaaaccttcccccttctgctagcctttgccatttcatatgcggctttccattttatcagcaaaccttttcttacgcttttccccggccacagttcttcgttcggttcatggctgtcctacgcagtctgcctttgcgcgcctttctcggtatgctacggcattctgctattatgcatcagccaaggcgcaagagacctgttgcgccgcctcccatctcaattaagaccatcaggcgccaccaagaaaacatgaagagcactccccccagattcagcatcgtcactatcaacctgaacaaccgggcagggttggaaaaaaccgtccaaagcgtcatcaaacaggaatgcgccgattatgaatatatcatcattgatggaggttcttcagacggcagcgccgaaattatcaaaaaataccaaaactccctctcatactgggtcagcgaacgggataccggcatttacaatgccatgaacaaggggctgaaacaggcacacggggaatatgtctgctttctcaattccggagattgcttctattccccccaggttcttgccgacatgcaccgggagggaaccgtctccgacgtgctttgcgggagggtaataacggtaggcgggccaagcgggaaggcatccccgccgtggaaaaataacaccctgtatttcatcatcaaaaatttctgccaccaggcggcattcatgaggacacggctttgccacaagcaccagttcgatgagacttacaaaatttgcgccgacaggaaaatgctgctttctcttctgtttcaagagtcggccacattcaagcccatcaacgcatttatcgcttatttcgatgcgacgggcatcagccacaccgccgcaacaaccatgcttgaggaagacgccagatccctgaaggagaccctgccggccgccatactggatgactatcggcttttgctggcctcgcccatcgccccttattacatggatatgctggtcaattttaaaaccccccggaaaaatacagcttttttccttgcccgcatctctcgggtcgcggccaaataccttcttctcctcagttccctgtgttccgcccggaaaaaccggccccttccctagcgcgaaccccgctgtccagcgctttcccgcaggcgttccaaccgttcccggtaggcttcagcaagacgcccggcgtaggcttcccaggtattttccgaaccgccaaacgccgcatacgcctgctcgcccaggcggtgcactaaggcggggttgtcgcacagttccttcatggcccggtaaatagcctccgcatcggcggcagggatgattctggcggaccgcccatccagcagcgttgtagccccagactcgtgggtcgcaatgatgggcagccccacggccatggcttccagcaatgaacgggcaaacccctcttccagggaaggaagtataaacgccgtacaggaagcgagccggcgggccagttcctgctgggagacggacgcatgatgatacagatgcgggcaggttttccatttctcccacagcggccggaaatcgggccggatgcccccgtacacatgcagctccgcatcgggatattgctcaaccagtttctgaaaagccagaaagaggtactgatggcctttccgaaccgtcaggttccccgtaatgatgaatttggggaaggaagggatgtcttccttttctcttttgaaaaagagggaggtgtctgagccaaaatgattgagcaggcatttttccggtgaaacgccgttggtcaccatgctctccataacataggtgcttgggcatagaacacaatcggcccgatgaatttcccggttcatgcggctccacactttttcccctacgggaacccggaagccgggggaatgaatatccgcctcccgctgccaatagccgcgctgggtggtcggatgcccgttcatggcttcgaatacctttaaaatggttcttccggaagcttcggccaggtcaaacacaggcgagcaagagcccatcgggcactgcacgacatccacatctgccgggagttcctgcctccttacccagcaatcataaagccaaaggtttctccacctcatctcctcttcaagataagcaggggcaacatgataaaaaggtttcatgcccaaatggtagggccaaatgcgcttatatttcccagaaggaagccccctgtttttgttgcttacccacatgccggacaaaatgcccagcttttcaaaggaggcagccgttttatccatatgccatgaggccatgccggagatgagaactttcatgaacagataatggtccgtctttccctaaaggaattggagaccatattcaagaagaacttttcccgttcctgcgggaattgcagatattccctttctttgccattgaccacgaatgggaaatttctatagtaccgcttatactgtattccgtgcagtttaacttcaagcctcgtccggcgaaaatgccgcaacacagcaatgccttcccgcccccctttttcagtattatcatccctgtttataatttagcggattatatccaggagactctttcgggaattaaagaccagttgtgggatgattatgaaatcatcgccgttgacgatggctccacggacggcacggcagaactgctggacaggctcgacaatccgcggctgaccgtacttcatcagcgcaacaaaggcgtatcatgcgcgcgcaataccgccatcaacgcggccaggggcgtctatattgcctttctggacggcgacgacgtatggctgcccgaacatttaagccatgccgcccattttttccaggcccatcccgacgcggcatggtacacgtccagctatgccaaaagcttttcccccgaacaggataaaaaaaatattcactccggcgaacatcctgtttttcgcctgggtcattattttcctgacgggatccgctgcattcatacatcatctacgataatccgccgtgacgccatcccggaagggggcatgttcccggaggatctccgctatggagaagaccttgtcgcgttcgcgaccatcgcctccctccaccccgtcatcggcatcaatgactccatcaccgtcctgtaccggcaaaggcgggattccgccgtacacacccccatggacctgaatacgaaagtagagcaggacgccgccattttcaggcatttcatggccattcccgcaaaccgggaaaatgcacgcgcaaccatgaattattaccgaagcatgtccctgagcttctggattaaccggatcatgagcagccggctcaacacgtggctgccctccattcgtgagagaaaagccgcgaccggcactatggtcagcctctggattactctgttcgtcttatgcaatttcctgaatgtcatatttttttcattgcctctcctgttgctgcaaaagttaagaatccggtttcaaaaatagaaggcgaacgccagctgcgcacattccccgctacggcgagccctgcgcctgccgtatgaattccaccccgttccaccgtctacattcactttttccccctgccaggcccaatgattatgccataagaaaaattcggcatttctgcaccggctccagtcattttttccggcaggtcatttccatttccgtacattcagggattccgccgaatccggaaatgtccgcccgccaacgctttctggaacgcgtcaacgtttcagacctgatgatttctccggccattgacggatagtctggcagtcgattcgtttatgaaagtcgataccatcaagggaagttcatatgtagtgacctgtacaaaagcctgtaccgtacgcgctgttttaaactccggcggggattccatgcttattctggagacgggggaaaaaggccaatacggttttgcggctccgacggatgctgtagaagtatccgacgacgacgccctgatcacccgggtttccaaaacagccgtcccgggattgtccgtccgggacggcatccagccggggactgacgccgcattgaagagtctgacggcggagtccgggacttttacaggggccgtcaacgccaacggcggcgtcaacatcccgcttgctgcgggcgcgccgaccgatacctcagcgctcaaccgcctgtatgccgccggactggcttttgcggccgagagcttttccctcccgtcttatcctgtgaagtcctcctgttccgccaccggaggcgcctcttttgatgatactcttgcccccctctccctgggattgagggtgcctgcgcaaacagcggtctcggccatgatcggttttgccgatgcgggcaagtcttttaataattacagcgggacgcgcggttttgttcttccggtttccctgccccaggttcccttcaaagtgacgctgcctgtttataaggttcccgtcgtcttccgcgagaatctggagctggattctttcacgcttgttccttccgcctccagtctttttttcggggagattctggatattacgttcaatccggagcgtgacgccgacgcgggcggctaccatgttcgcgtccgggaggtttactggtccaaccaggcggccggcatgaaggtgaagacgacgcattctcttgtcaaggcagactcaaaccagcggctccccctgtgcgtcgcgaagattgtttacgaacagtggcgggatggacaaatagatactgaggaaagaggggctctgtggctggtccatttcggctcaacagagagtccctgcatcaagatagcgacggtgcgcggggcacattgctttgagagcaattcattgggcaaggtttatctggatatagccagctccgccacagtccatcaaatacggatagggacattgagccagcatgttggcctgtccggactgaacccggcgtattacggattttccgccatggagaccaacgccattgtttccgaaacggtggaggatttcaacgatccggaagcgtaaggaaatccattcacgaatcgccgcgcgaatttttccccgcactttccttcgccgtcaggttgccgcgccgccttccgcacgccgtgccagatggccggccggaagaagcggctgctccatcgcggacagagctcccccgaaacaggccgcctctccggcaggaaggcaaaaggatgcgccagagacggctccgcccggaacggaaaaaagattccgggacggcgcaggaatagctgtctggcgtattagacaattccaaagagccttaaacggtccctccccggaacagcatggctttccgggcggagctctcattcctgttcaggaggaaagactctccaatgccgaaattgcgcagcaacctcttcctgtcttctgtttcattcatcccgtccttactcaagaaatgccggaagggcatatttcacaataaccagttttattttgcccgtccgccgggtaaaaaagagcagaatcccaacttgcccccgtataaggaagaaatccggcaaagattcctatagtgcttcttgttttattcccccttttcatttatattgccgtccatgagcaagggccgtttcctcatcgctgcgtacggtttccctctggagaaagggaaagcaggtacggttccccgtagaaaggcccgcaggttgaacctcccgaagcgtccgtgctacattattgcccacttacaaaatttgcctgcagcatcccttccgcgcgagatacaatctcatcatcgccatcctgaatgctccagaagtgtaaaatccaccaggtttcagaataagaaaacgctgcagagtccatgcgtcccaatacccgttacaggaagtctctgttatttctgaaaaatctaaaatcaattcggttccatcaataaaacggttttctcttccatacatgattacttccagtcattcccgccccgttctcgtcattgcctcagatatgccgctgggtcgcatcatccccaatgaatttcaagaaaaagactgctctctcacaccatggattttttctctgttccaagttctggaaaagcagacggaatacgacatccactggataactctcaaaaaatatgtgtccaggcacacagttagatctctaaataatcaaaccatccatattttgccggattccagcctggcagagggattgctctccaaccatttttccgcttccagaaaaaattcgccgccttctggatgagcttaagccggatctgattcacgtctggggaattgaactggcatatgcaaccgcatgcaagatgcagcttcaaaccaaactgctatcttatcagggatctttggttgcctattgtcaacgctctaaaatgaaaacatttccaaaacttcaggcattttgggaaaaacagactactccgaaataccgtcatatctcttgtgaatcgccatgggcgcgagaccgtattcaggaaatatctccttcctctcaggtttcactcatcgaatatggagtagaacagtcgttctatcatgttgaaaggtcaccctctgcaacgccggaatgcttgtttgttggcaatatcagcgagttaaaaggcgttaaatatatggttcaggccttcaggcaaccttccttgcagcatgttcggctttatattgccggatcaggaccattaagaaaaaaactagagccaataagcactcccaatatttattggctgggaacgctccaacgtcccgaactgcaaaaacggttgtcatccgcatggtgtcttgtgcatcccactttggccgactcctcccccaactgcgtcaaagaagcaagagttgcggggctccccgttattaccacctgcgaaggggggcagacccaatatgtcgttgatgaaaaatccgggtacattattcccgtcagagacagtgaagccattagccaggcagtcctttccctgactgagtctttagagaaaaacatcgccatggggctctatgaaattgaggaagtcagaaaagctctgaacatacagttgacttgcgacaagtttctatctctgtacagatctttgataagagacaaatgattcctgtcctctaaattaatttcataggaaatgaatccggatctgcgccagcgccttctccccccgtcctgaatatttatgaaaaaggttgttttcgtcaacttcggttccgcccggtttacacaccgccaaatattgcagcttctttctgccaaactatctggaaaagcggatcaagtacacggatttcgacctaaacacctaaaaaaactggggttttatcgtacccacccatggtttcatccttctcaaagaggatttgcattctggtcctggaaaccttttatcattcatcatgccctgcagcaggtacaaaacggagatatagtcatttattcggatattggaaggccgtgggtgcggttgttccaccattccctgagtactgttgaacaatggcttgacgaactggatcaggatatcatgcctggaatatatattccctacacgggcaccatagaaaattggaccaaggcgaccacactgaaccaaatgggagccttttctccagatatattaaattcccctcccattcagacctccttctctgtctggagaaaaacaccggcgaccatgaaactggcggaggagtgggaggaaaaatgcagacacttttctctgatcggagattatgttgcaagcacagatatccctaatggcccttcctttaaggcccacaggcacgatcaggctatcttttccatactatgctttatgcacaatatcaaagcattagacaccataaaaggacaaaagcctgcgcaggataaagacctggattcctggcttcagcttcagggggctccgccatcggacatcaatacagatgccctgttaaatggcctatcttccattaccagaaacctggagaacaccagtcgtgcctgtttgaagaaataaaataatcttttccgcctgtcattaaattttcatacattcgttccgcatccggatgccgcttctttttgtttccatccagcccgtactggaccggaaaatccctctggatacggagaagccccggacgcgcaagacgcggcggggcgcttttacaggccatgaaaaaagcggaggattacttgccgtaatgacagcgcatttggagcagttccatatctgtttccatgatgcggcaaacaaggcgattcgttgaatcaatgcgccggggccagaagccggagagtttttcccgcaagggttcgggcttgcccttcccgtcaaacggggtgcactgtatttccctggccatgtccatgatgcgcttgcaggttttgcggccattgccacgaaagaattgaaaatcttcccatgccgggggcgcgaagacaatatttcttttcatgggaaagccggaggttagcaggagtgactctccaattcttcaacgctcttcgttaccgtgccttgcctgcggttgagaacgtccatgccgtcaagcaggcggcgggcattggccggacatttgagcaaatatattgtttcctgccaggaattgaattcatcttccggcatgatgatgaccacccccaggcgtttattgacgatgcggacgggttcacggtcattcaggacggcggcaagcgtcctagatatggattgccgcgcggcggtgcttgaaatggtattcacgaataaagtgtacatgaaccatgtacataagtaagccattcttctgtattttctcaggcatcctgcaaagcgtcattaatcatgtttacgccccattgcccaagaaagcgctccgggtacgggataaggactttgatatgaaattcattcaggagcaaatgccctccctccaggaggttgaaagactgttccggcaacaacccagagctcaggtaaagattgatgcgggcaataccccgttatcatcatcaacagcagagcgcaaacgccccttacctttcagcatttcccttcccggcgcggaacgctgcaaagcggggattattcccttgccggtcctcaactgtttttccggcgagtaataatattattgcggagaccctcaccgttatttatggtgcggctacgccatgacgccgcaattcacaaaattccccgatgcgccaaaagcatcatcccgggaacactggattgacatatccaggttcctcgcggcatacctgattgtgtgcgtccacgctccggccttttctttctccagcatgttccaactgccggttttcaacggccgcgtagcatttttcctgattctggcaggctatttcatgggccggaataattcctggggaaaagcggtcaagcggttcgtgacgctgctcattccctttcttttctggaacgtgatcatttctttcttctatccggggaaagaggaaatcatgaatatgggggtactggaatatttatgcaatcttgtagggttccggtctttcttcacgcctgacctcaccctccccattgacgggctgataggcagacctttctctccggccacctggtttttgagagacattattctctgctccctcatttctcccctgctgctgaaattcaagtaccccgtgtatgccctcatcctgatctgtttctgtacggacttactggatatttccgactcgctcattaccctttctccccaacccgtcgccacgttctgcctgggccttctcctgtcttccatcaagctggcctcagtaaaaacattttatagaaattccttcactccctacgttctgctctccgtaggcatcggttttctgctcagcatcaccaactatttaagcgtctgccaaaataacccggaatggaacatgcacaaaatactggcatcctatggagtatggaatatctcctggccggctgtccatttgaattccctctgcccagtcttcggggcgcttcttctcatggcccttggaatctggctggaaaagaaaattcccgctgccagaaagctgtccaactatgctcccgcctgtttcctgatattcgttcttcattatcctttgatcatgttgatcccctcccacatctggaaacaatcctttttcgctccctttgtattaataccggccatcattttccttatcgtcgcattctatcttttcctgagaaaattcttcccggcctgcctgccctacgtcgccaacgaccgcatcacccatgttcccaaaaaaaattaaggcctgtatcctctttcttcttttaaccgttccggccgcattaggcgccgtctggtgcgccaaacacgcctaccgttaccatttggctgtccatcccctgccctattccccggaacagggcgccctgctggaaaaacaccggcaggacaaacgcaatgcccggctgaatccccatgcccccgtgttgttcctgggttcctccaccatggaattctggctgaaagaagggaaacattcctgggaaacctggttttcccctctgggatgcctcaacctgggaaccaggagcgagactacgggcaacctgctctggcgcctcaatgacggcctgacaagcccgctggcgcccaaaataatcgtcctgtattcgggagtcaacaatccgggagtgcaaaaaagcctgggatggacggcttttcagggaaacgtggctatcgtcaaaaaaatcagggagatttacagcccggaaacgaccgccatcattgtcattcccccgctcatcgcgcaaaaagggtcgcgtatggaaaccttcaggaattgtctgctgcaacacgactttggagaaaatgtccatgtcctccccctccatttcttccttccgggaaaggatgccagcctttatacttgggacggccttcatctcaacgccctgggatatgaagccatttcgcctccgcttttccgcttcctccaacagcttttaagcaggagcagcttttagggcttcacaggaacaacaaactttatccgccattactccacgtgatgattgaaccttttccaccccatcaggcaacacttcccatgaccctgttcctggcaggtcccaccggatcgggcaaatccgctgcagccgtggaactggcggagatgctggacgcagaaatcgtcagttccgacgcttaccaggtgtaccgggagctgcccatcctgacggcggcgccttccccggcagaccgggaacgggtcccccaccacatggtttccatcattccggtccaaaagaactggaatgccacggaacactaccaccgcgccatgcgctgcatggaagaaattcacgcacgcggaaaaatcgccatcgtcacgggcggttccggcctgtacttcaaattcctctcccacggcctgtcggaagcgccgccgggggacgctgctctccgcgccgctttcgcgaactgttccacggaagcgctatacgccaggctctcttccctggacccggaaggagcggcctcgacggatgccgccaaccggcgttatgtggaacgcaatctggaaatcgtccttgccggagggaaaccgctttccttctggaagaggaactggctggccccgccacgcgggcccggctgggtcatcagcagggatgtccctgaactggacggaagaatcgccctccgtaccgcacgcatgatgcaggagggtgcggtggaggaagcggcttccctcggcccatgctccgccacagcggaacgcaccctgggcctggcattgatacgaagcatgctgcgcgggaaaatctcccgtgaaaactgccagatccagctggccctcgccacccggcaatacgccaaacgacagcgtacctggctgaaacgcgaacaatggctccggaaacttccggcttcccctgccgactctccccgggatcttgcagaacgcatcatgaaggaactggaatcttcaccctctttcatacgccgttaaatatccggaaccatcccacagcgggaaaaatgccagacgccattcataacgcacgccgccacgaaccatgggcacaggatacgcatggcagattgagcttacgccgcccgcttaaaagccagagatctgtcgaaagttccgccaaataaccggatcaggatgcctgtcttccacgctttttgtcttggcttacggaaacatctttggtttacaggggcaggcggcaaaacttttctcaaagcggtccgccctatcaccccatattttttccagcatcgtggcacgcatccttgtaggcttatcaggcggagtggacagctccgtggcagcggctctgctcgtggagcagggtcatgacgtagtgggggcctacatgaaaaactgggtgaatgacgaaggcattcccggagaatgcccgtgggaacaggacattcaggacgcgctggccgtcgccaaaacaacaggtattgaattccgggtcatcgacctggtggacgaataccgcgcccgcatcgtgaattatctgattgaaggctaccgcgccggatatacgcccaacccggacgtattgtgcaaccgggaaatgaaattcggcgtctttctggattatgccctggaacaggggttcgattacgtcgccaccggccattacgcccgcaggatggacacgccgcaaggggctttcatcctgcgcgggcgggacccgaacaaggatcaatcctacttcctgtccctgatgcgcccggaccagatagcccgcgccgtctttccccttggggatctgctgaaaccggaagtgcgcgttcttgcggaaaaatacggcctccccacggcacgcaagaaagacagccagggcatctgtttcatcggccaggtaaaaatgagcgatttcctgcgccactacctgccggacaagcccggcaaaatcgtggacacggaaggccggacgctcggcacgcacaacggcctgcatctgttcaccatgggccagaggaaagggcacggcgtcgcctccccgcgggagggagtcgcctatgtggtggtgggaaaggatgtccagcgcaaccgcctgattctgggatacgaagacgcgtccacgcggggattgtacgcgtcccgcgccgtggtcggcggcatttccaatacgctcgctcccctgccggcccgcgtcatggcccagccccgctaccgggccaaggcggaatgggcctcctgcgaatatctggaagaaggaaaggtgcgcctgggctttgacacgcccctccgggccctggccgtgggacaggtctgcgccttttacgacggaggcaagttgctcgggggcggcttttttgaatccatagaaccatgactgacccggaacgcaccatagccgcacaggccaccgccgcaggacagggagccatcgccgtcatccgcatgagcggtcccggctgcatggacatcctgaaacaatgcacccctgcggctttcacggaacgcctccggccgcgcagggcgacgctggtctgcatccgggacgcggaaggagccgccattgaccaggcgcttgtcacctggttccccgccccggccagttatacgggggaagataccgcggaaatctcctgccatggcggcatgctggtgacggatcgcctgctgaaacgcctctaccaatgcggggcctccccagcggaaccgggagaatttacaaaaagggcctttctgaacgggcgcatggacctgacccaggcggaagccgtgatggatgtgatttccgccggtagcgacctggctctgaaagccgcgcaaacccagctggacggaggcgtcggcgcccaggtggacgaactgaaagacaacctggttcatgtgctggcccacattgaggcctatattgattttccggatgaagacatttccccggacaccgcctccgatcttctggcgcgcctccggagcatggaggaaaaactggccgccctcctcagaactgccgaaggcggacgcctgctgcgggaaggcatccgcacggcgatcgccggaccgcccaatgtgggaaaatccagcctgttgaataccctgctgggatatgaccgggccattgtcagcaatattgccggaaccacgcgggacacggtggaggaatccatccagatggccggactggctctgaggctgattgatacggcaggcatgcgagaatcttccgacgtcattgaacaggctggcattacccgcaccaacagggcgcttgaaaccgcagatctggttctggaagtggcggatgcctccatgccccgggtaaaagaccacaccgcccctgccctcaccgcgccccggctgcttattctgaacaagtgcgacctgagaatccatccggactggaaggacgtgcccggcatccggttttcctgcgccaccggggaaggaagaaaggaattggaggaagccattgtccagaccttcgcctccaccctgcccggcgaaacgggcagttcgctggtagccatcaatgcccggcatcagcatgaacttggcctctgccgggagcatgtccggctggctgcggaatccatttcccgccaggaaagtccggaattcacggccctggaactgagggaggccctgacgaacctgggagaaatcaccggagccgtggatacggaggacgtgctgggcgccattttttcctctttctgcctagggaaataagaagaagcttccatcagcaggtttttctgactccggaatcttcttttctcttcattctgtggaaggatagcaagcatccaaaaatttatttgcagatattttcattgattccggcttgttaattcgctatcgatatcatgtttttatgttgcgcaccctttctctctttttccttttcgctctggttcctgttcaagccgccatttattttgcccataatgtttccgaagattcggggttcataaataccaaaaaatactggaacggagattccgatttatgctgggcggccacagccagcaatatgctgcaatggtggcagaataattcctccggcattccggctttcgttcccaacggccagaatgaaagcggaagaacggaaatttacgatgtgttttgcaataattgggccaataccgggaaaggcatagaaataggcctgcggtggtacctgggagggaaacctctcaatcccaacaattatttatacgattttaaggaaaccatcactgaaccgcagaatactggccgatactgggagggatacattacatctctgggattgtcctcttccacctgggaaggcgactgccctttcatcagcagcaaatacttcacgcaaagcgactttcccctccagttcggtacagacctcgtctcatttttccagaatggcggcgtagtgggactttccattgctcctgcatcaggtccgggtcatgccattacctgctggggaattgaggttgacgacactaccggcatggccaaatccctgtacgtcacagactccgacaacggacaaggtctggaaaaacgggacgtttattatcatgaaacggatggaaccctgcacttggggagcgagaacggccctcgaatcaacgcatacgacgccctgatgctgcccttttataatgttccggaaccttccacggcagttctcaccaccctcgcggcgggaactgccttttgccgccgcaggcgccgacgctcttaaggcttcacgtaaacattccctcctgtcaagtttccggctcttcaggaggcgaatcggtatccgaggtgaataacggaatgtaggaaggcaggttccagttccagcggatggccgccaggcgtacggaaagcgtgaccatgaagcccgtcacgaagcaggtggaagaatcaattccggcatagtaaagcaccgcgtacgccacgcctcccagcagggccgcggtggcgtatagttctccgggacggaacacgtagggaacgttgccggtaagcacgtcgcgcagcaggccgcccgccacgccggtacaaatgcccatcatcacggaaacagtgggcgtatagccgtggagataggatttttccgtgccaatcatgccgaaaagggccagaacgatagcatccgccacgcggatagtgcccatgggaggcggatatttctgggccacataaaaggttgccagactggtgacgacggaggccagaacaaaaatttccccggaggggagcgtccagtacaccggtatgtccagcaggatatcgcgcacggttccgccgcccaacgcagccagggtaccgcagacaatcacgccgaacaaatccattttcacccgcgaggaagcgatggaacccgccagggctccaataatcgtgctcatgatttcacaggtggagaggaacatggcgggaagaacaggaaaaaaggcatattcagcagacccgtatccacggcaggcaggagtcctggctggcgcagaacagggaggtggaagccagccccatgtcatgcagggtatcacgcatcaggctttctgccaatgccggagaattgctttctgcgctcaggtgggccagcaccacgtttttcagggctccatgggcaatccgcctcagcaggtcgcacgcctgctcattggacagatgcccgtgcgcagaggcgatgcgctgcttcagcggccaaggcctcctgggagtggccgccagcatgtccggatcatagtttgattccaccaccaggctgtccaccatggcaaggtattccgcgatgcagccgggagcctgccccgtatcggaaataaaacccaggctggatcgctccgtttcaaatttgaatcccaccggatccacggcgtcatggtaagtggggaagggagtaatgacgatatcccctattctgaaagactgccccttttcaaaataggcccagggagcctccggcgctttttcctggacgcacatggccgtatggcgtgtggcgtaaacacgcacggcatgctttctggtgaactggtgcacgcctttcatgtggtccgcgtgttcgtgggtaagcagaatggcgtccagctcatccggctccactccggcggacttcatcttatcccgcagcctggcggcgctgaacccggcatccaccagcaggacggtttcccccgccctgacaatggtggcatttcccccgctgccgctgcccaacacgcaaaactgcatcatgcgcggaatataataccgcccccggaagggagcaagaacgtatccatgctttttttatgacatgggcacatgaaaaaatacttttttccagtacggggttgacatttcaggtgcattaaagtgtattgaagtcactacgtagtgtacttgcatgcgatgagcagtgtatcagacaacctttttggtgcatacacgcacaagctggaccccaaaaaccggattgccattccggccgaatggaggccctccgaaggttgcgccctgctcctgttatccggccggcgtcttgatttgccgaccgtcaaagcctatacgcgggaaaaattccagcaactcattgacaagatagaaacaacgcccggctacacggaagcgcaaatcgaccttttcatcggcaaattatacgccaactgtgtggaggctgtcatcaacgcccaaggcaagctgctgatacccaaacaaatgtgcgaacacgcacagctcagttcctccgtccggctcgccgcacggagaggatatttcgaattgtgggaaccctctctctacgaagaagtttcccggcgtgaaaacgccagcatctccgacatcaaccaatcctacggcattctctagctttccttcatgcccccagactcttccattacgcccaatccccaggcacgcccctgcgcaacgcttgcattgcgcccgggctggcttgcttccggcctgggcgtcggcgccagaaccgggctgcatgcggaactcacggcttattccatcgttttctgggggcacgatgcccttccggcgcaggatatggttgcctggcagcaggaaaaggcacgcctcatggtggagatgtccctggccgggcaaaagggcgcctatggcaagctgggcgcattgtcttccggcctgaaccgggcttttgacgaccatattgagctttctttacgcgcgggcgcgggtacgcacgtccgcacggaggaggtgcaggccctggcaaacgggctcgcggaagaaacatcctgccgtgtgctggcgtggagcgtctgccgcaaccatgtgcatgtgattgcagagctgacggaggaaaagggagtggatgaactggtctgctcatggaaagccctggccccctccatgaactgggaagacgcgtaccacacggaagccctgaaagcccgggaagccgcggccagggtggacgccctgatttccgaactgggggatgacgccgttgccgctgttgacgcggaagcggacggcaccgtctccggaaacggcttccgtcacattaccgttctgctgcatgagacggtggacatgctgaaagcgggccccggcaaattcatcgtggactgcacgcttggcggcggcggccatacggaacttctgctggaacagggcgccaccgtctggggcattgaccgcgatgcggacgcccgccgcgccgccatgctcaggctggcgcgcttcggttcccgtttcaaagtgctcgccggcaacttccaggacgtggaaagcattctttcccagcagggggtttcccgggtggacgggctgctggcggacctgggcgtttcctcccaccagcttgacaccgcctcccgcggcttttcctttagggaagacggccctctggacatgcggatggatacccgcgccgctctctccgcccggaacctggtgaatgaggccccggaagaagaaatcgcaaatatcctctggcaattcggcgaggaacgcgcttcccgcgccattgcccgcgccatagtgaaagcccgtgcccaggcacccatcaccactaccgcacagcttgcccgcatcgtggaatccgttctgccgcgcaaaggaaggcagcactccggcacccgcacgttccaggccctgagaatagccgtcaacggcgagctggatgccctggacgctctgctggattcctccgtgcgtctgctcgggcagggggggcgcatggccgtcatcaccttccacagcctggaagaccgcagggtcaagcagttcttcgacctccggagccgtccggaaatagaccgcccggaatggccggcaccccgtcccaacccggattactgcttccgcccgctttcccgcaaacccgtcactgcgggagaagaagaactttcaaccaacccccgttcccgcagcgccaagttgcgcggcgtggaaaaaatcatctgaccatctctcttccgccaccgccatgaaaagattcaaacagcgtttcaccggccaccagatcagcgtgagcatgatcatgtggctcattgccttcgccgccctcacctgcggagcgggcatcacttatgccgtgctgaaaaacgaccagatccaggtcgcgcgcgacatcaagcaaatgaatgaagaaatcgcctcctgcgaactcacaaaggaatattaccgttccaagacttcctccctgaccagccgctgggccatccgcgacaggctggcccaggacaagtccaacctgcagcctatcgagccctcagccgtagaatacatttcttccgaaaacgcctcccgcatcgctgcggcaggccattaaacgcgttgagccgttcatgatcacgatcacgaagtccagatttgccagaagaagcctcgtcctgtgcggcctggcgggcgcggcggtcatctggctgatgttgtcgctggtcaatcttcagctggtttccccccggaaaacgagcggcgtttccagcggcggcattattgaacgggaggttcttttgccccagcgcggccgcatcatggacgccaatgaggaaatcctcaccagcaacatgcagagttccgagctgattgcggacggctatcatctgaacgaccccaagaccatcagctgggctctggcctattccaaggccgttcattccccgttctgggagaaagccgcaacggataaggaaaaggaaaagctcgtttccggcttccgcagcaagattctgggccaggccgccagcaaaaaggacggcagcaaggaacataatctggcgaaaatcctgctggaagagcctgaagacggaccggaaggggtggatatggccaggaaaaagctggaagagctttatgagccggagatggtgaaagaatacgtgcaggcgcacctggaatacgccgccaaagtgattgcccctttcctgccggacatgagcgtgcaggacatcatcaacacggtggaaaaagacggggcgattcccaaaaagcgcatcgtcattgccaaaaacctgtccgaggaaaaagcggaactgctgcggcaggctatccaaaacgcccgagtccaggggttccgttttgagacctcctccaaacgcgtctattccgtgccggaatgcatggtgcatattctgggctacatcgcccagacgaaggacagcggcccccggcccgtagccctttccggccttgaaaagcagctggacgaccagctgctgggccacaacggcatcagggaataccggaaagacagccgcgggcgcatcattccctccgcggattcccgcttcaaggatgccgtggacgggctgaacgttcgcctgacggtaaacatggaataccagacgatcgtggaggaggagctggacgccgccatctctttttacacggaccagacccacaaaccccgcggctgcattattgtggtggaacccaagaccggcagcattctggcgatggccagccggccccactataatttaaatacgcgcgagggccttcaggaaggcgcctaccatttcgccgtgcagtccctgtacgaacccggctccacctttaaaatagtttccgtcacatccgccgtggacagcggaaaggccacgttcgacaccatgatcaactgcaccccctatccggtgcccggttcccgccccgtcacggatgccccccgttcctatggcggtctgaccgtagcgggcgtgctgaaaaaatccagcaacccgggagccttccgcattgcgctgaaatcgggctggcccacgtataaaaaatactttgacctgtacggattttcctccaaaacgggtatcgacctgccgggggaaaccaacagccagtgccaggacggcagcaattttgtcaacttttcccgcatcagcttcggctactccctgatggtgtcccccctgcaggtcgccatggcttatgccgccatagccaatgacggcgtgcgcatgcgcccccggctggttgacggcatttatgtggatgacaagaacttccagccttccccccccgtggaggtatgccgggtcatgagcgtcaagacggcccgggaccttcggaacgccctgttccacgttacggatctggacgggaccgccaaaagagctcggattgaaggctataacgtgggaggcaaaaccggaaccgcccacaaggtgaagcctacaggcggctattttgaaaaccgctacaccgtctcctttgtaggaatgctcccggtggaggacccggccttcgtctgccttgtcgtcattgacgaccccacttccaagcattgccatcccggaggcggaaccgtatgcgccccggttttccagaagctggccacccgtctggcggccgccatgaacatacccaagaatgccccttccgcggaggcaaataaaaaagcctcccgtgcccaggcctcttccaccccatccaaaccgccgcgcagataatcccgtcatgaagctacttaccttactcaaagaccttccctcccatacgctcaccggctccccccaggtgaaaatttcacatctggagtgcgacagccggcgcattctgcccggttcctgctacattgccctgaaggggacccgggcggatggccatgaattcatcccggaggccattcgccgcggagcatgcgccgtcgtcgcggaaatgccctgcacgcaggaagccagggaggccggagtcagctgggtggaggtgaacgattcccgcctggccgtcagcctgatgggcgcggcctggaacggacgcccttcccgccacatgaccatgatcggcgtgacggggacgaacggaaaaactacgacggcctacatcgcccattccctgctcaagcagtcctggctgcgccccggattgatcggcaccatcgcctatgacaacggagaggaaatcactccttccacccataccacgcccggaccgctggaactggaacacctgctgaaggaaatgtatgaaaacggctgccgcggcgtctccatggaggtctcttcccacgcgctggaccaggaacgcgtggccggcatcaatttcaacgtgggcattttcaccaatctgacccaggaccacttggactaccaccacactatggagaattatttccaggccaaggcgaaattgttcgaacagatggcgcaggacaccagatcccggcgaaaacccgtggccgtcatcaacatcgacgacgcttacggccgccggctggcggaaatgttctccggccgcatgaccgtaaagacctacgggtccgccctgggggcggatttccgcatgctggtgcaccacgccaccgccaaaggcagcgagtacgaattggaatacaaggggaaaagctacctggtccgtgtccccctgatcggcaagttcaacatgtacaacagcctggccgcgctggccgccgtcatttgcgccggcatccccgtgcgggacgccattgcgaaccttcagaatattccgcaggtccccggcaggctggaactattcacccaccccggaggcgcccaaatcttcattgactatgcccacacgccggacgccctggaaaacgtctgcaagacgctcaaggaactgtgctcccgccgcctgattaccgtgttcggctgcggcggggaccgggacaggggaaaacgtcccctgatgggagccgcagccgcacgcctgtcagacgcctgcatcgtcacctccgacaatcccagaagcgaggaacccctctccatcatcagccagattgcggcgggaatgccggaaggcagatacgccatcattccggaccgggccagagccattgccacggccatcgaccaggcccgtctgggggacatcgtcctcattgcgggcaagggccatgaaaattaccaggaactttccaccggccgcattgatttcagcgacgccaaggaagtgcgccgcaacatgttcatcaaggaacgggaagaattcccccaggcataacacgttattccatctttctttcatgatttccctcacggcgcacggcatctgcaacatcatcggcggaaaactggtcagcggcccctttgacagagtcgcttccggcggcgtgtgcacggacagccgccatttgccgccccatgccgttttcttcgcgctggggggagaaaaatttgacggcaacctgtttgccccggaggcatcccgtaccgcggccgccgccgtcgtcagccgtgtggaggaaggcatggccccctcatgcgccgtcattctggtggaagacacgctggaagcccttcagaggctggccgcctggtggcgttcagagcttaccctcaccgtcatcggcctgaccggctccaacggaaaaacctctaccaaggatctgacggcctccgttctttcacaggggctccgcaccatcgccacgcagggcaacctgaacaaccacatcggcgtccccctcagcatcctccgggccgccccgtccgacgaagccgccgtatgggaaatgggcatgaaccactccggggaactggctcccctgtgtgaaatgacgcgcccgaaaatcggcatcatcaccagcatcggcacctcccatatggaatacctaggctcccgggaaaacatcgcccgggaaaaatgcacgttggcacactgcctgccggaagacggcttcatgatttttccggcggactgcgattatgcggatatgatccgtcaatccacccgcgccgcctgtattgactgcggcattggcgccggaaccgttcgcgcggaaaatcccgtctctaccgagaacggaacacgcttcatcctttccatcccggatttctgccgggaagaggtggaattgcccgtccacggccggcacatggtaaccaacgcgcttctggccgccgccgccggctgggtggcaggtcttgcgaaagagcaaatcgcctccggtctcacccaggcgcggcttacgggcggaaggcttcactgctcccggatcaacggcattctggtagtggatgacacctacaacgccaacccggattccatgcaggccgccctgcgcaccttagcagagctttcctgcgccggcagacgctttgcggtgctgggcagaatgggggaactgggcgtgttttccgaggaagggcatgttctggtgggccgcacggcggaagaactccgtcttgactgcgtcgtcagcgtgggaacggacgccgcccggattacggacgctatttctcccaattcattcactcaacgcctgaacttcagctccgcggaagaagcggccgaatggctccgcagccatacggcgccgggagacatcgtcctcttcaaaggcagccgtcttgcccggatggagcaagtcatgaaccttacctttccgccacagtaaattgtatgcattccctcattgaacagttcagcccctcaggggcatttgcaggaccggcagggagagccctcctggcctgcctggtttcctttgccttgacgatgatcttcgccccgcgggtcatccgggagctgatttccctgaaaatcggccagcccatcaggacagcggaggaagtgcacaagctggcggaactccacggagccaaggcgggaacgcccaccatgggcggcgtgctgatcgtgggttccatgacggcggctaccctgttgtgcgccagaatgggcaatccctttatcatttcctgcctgatcgtcaccctggcgctgggcctgctgggattccgggacgattacctgaaggtggcgaaaaaaacctcggacggcatttccgcacgtaaaaaactcctcgtccagttcctggccggcctggccggcgtcaccttcctgtacctgtacccggaaggcagtccccgcgtggaacttcacgactacatatcctccctgttcattccgttctatggccaggtgaacctgccatggttcgtttacattcctttcggcgtcgtggtggtcatgtccgcctccaatgcggtgaacctgacggacggcctggacggccttgcctccggctgctctgtcgccacgggcatcacttacgccatcattgccgtcctctgcggaagctggctgacggctgattccctggatattcccttccaccccggcgcgggagaaatcagcgtcttcatgatggccctggttggggcctgcctgggcttcctgtggcacaactgctacccggcgaaggtatttatgggagacaccggttccctggccctgggcggcgcgttcggcatggctgccgtctgcacggcgcaggagcttctctttatcgtcatcgggggcgtcttcgtcatggaagccgtgtccgtcgtcctgcaggtgggcagctacaagctgcgccacggcaaacgcatcttcgccatggctcccatccaccaccattttgaactcaaaggctggaaagaaacgcaggtgattgcccgcttctggatgatcagcctcctgctggctttcctgggccttttcctgattactaccgcctgacaaaccacgaacatgcagctcaataacctcaacatcgccgttctgggagcgggaagaagcggacgcgccgcggcgcgcctcgccatgacgcatggtgcacgggtatgcgtgtttgacgcttcctcctccattgacggatggccggaagacattcccctgcataccgccgccacggaggaagacggacgcgcctttcatgcggatctggtggtcatctcccccggcattgagacggatagcccctttgtcaaatcctttggacgggaaggcgtggaaaccatcggtgaaatggagctggcatgccgcttttaccatggccgcatcatcgccatcaccggaaccaatggcaaaaccaccaccacatccctggtggaaaagattttgctgcgagccggaaagactgccgttgcctgcggcaattacggcgttccggtggcggaaatcctgctccgggattctgtgccggatgtgctggcgctggaggtcagctctttccagttggaaaccatccgcgattttcacccggatgtggctgtatggctcaattttgcgccggaccacatggaccgttacaaatccgtggaggattaccaccgcgccaaactccatatcttcgacaaccagacggaaaaagacctggccgtcgtccgctccggggaacggcttccgcacctgaaagcctccgtgctcaccttcagcccggaagatccggcggctgatctttattaccgcgaaccgttgatcctggagggcggcgcttccctgctgaacctggaagagaccgccctgaaccagcgccataatgcggaaaacgccatggccgccgtcctggcatgccgccacctgggcattcccgcaaaaacagccgcagatgtattaaaagagttcacgccccccggccaccgctgcgagaccgtccgcacactggacggcgttttgtggctgaacgattccaaagccacgaatctgcacgcgctggaagcggctttgaaatcacagcattcccccgtcatcctgattgccggaggcaaggacaaggggctggattacgtgcccttgcagcccatgctgaaagaaaaagtgcgcgcctgcgtggtattcggccagattgcggaccagctccagcacgctttttcccccgcagtccccacggaaaaagccgcagatgtagagacctgcgtggcaaaggcccgttctctcgccctgccgggagacaccgtcctgttctctcccggcacttcttcctttgacatgttcaccggctatgtccagcgcggccaggccttcagggacgcggtgaatgccctgcccccctttcctgacaattcaccagaaaacgaccatcatgaaaacgaccaaaatacctgatcacaatccgaccggacgcacccgtccgaaacgtaagatgggcaccgtattacgcgccaaactcagcaaataccgcgcccgcgtttccgaatttgaagacgatgcgcccagcagcaccgtcgtgcgctggctcgtcgtccttcttcttcttcatcttctcgtcatcggcggcgtttatgtccgcagcacctggttcagaaacacgacggaaaccgtagaaatggcggccacgctgcccgcaccgcccaccgttccccagcgccccgctcccgcagcgcctccgtccgtcctgccccaggttccccaggcgccacccgcggccccggtcaccatcacgcagccggaacaggtagtggacgcgcgccccaacaggcagccggcccctgtggcggaggaacacattccggatgcggctccggtggcaggtcctgcgcgccacatcgtgcgcacgggagatacctgggaacgcgtcgcgcgtgacaaccaggtagctgtcaatgacctgaaagccgtcaaccccaaagtgcagcgtcttgtcagcggaagcactcttgtcattccggcccggccaggagacaaatttgaaccggaaaagtccgccgcggaggaattggagccggaaagcgtgccccacattgtgaagaaaggggaaaccctctccgtaatcgcccgcaaatacaaaatgaactggcgtaccctccaaaaattcaacaagatgaatgaccgggacgtagcgcgtctcaaaatcgggcaaaaaatcatgatccccaaaaagtaggcatcttcctgcccttccgccgccatgtcttccaaagtctgcatgattctggtctggttcttcgtcatctgccttctggtcgtaggcctggtgatggtatccagcacggcggcgtgggcggaggaaaccaagcacccgtacgaacccctgttcaagcagaccgcctttgcctgcgccgggctggtgggggccatgattctctcccggatagactaccggatatggaggaagtatatctggtggatccttggaggggcctgttttctgctggtgctgtgctatgtgcccggcatcgggaaggaaatcaacggggaacgccgctggatcaccatcggcatgcagttccagcccagcgaatgcgccaaactctgcatgatgatggccctggccaactggctggccctgtaccgggaccgcaccacctctttctggtggggttttgtgatgcccggccttatcttcggcattcctcttgccctgattctttttgaaaaggacatgggcacctccgtagccctggccctggccgcgttctgcgtcatgtttgtggccggaacgcgcaaaatttacctgggcggggctttcgccctggccggaacggccctgtacgttctggtgcagagcaacgccaaccgcctggaacgtttcctggcctggaaagacctggacgcccaccgcctgggcgccggcctccagcagtaccgtgcttccatcgccctgtcccgaggggggctggacggggtgggcctgggaaacagcgcggaaaaacacggcacgcttcccttcgcccacacggacttcattttcgcgccgctgggagaggaattcggtttttacgggaccatgttcgtcctgctctgctatttcctgatgacgtatgccggcatcggcgtggccatgcagtgccgggacacctacggacggtttctggccgtggggattgtcgccatcattttctgtcccgccatcctgaacatcgccgtggtaaccaacgccgtgcccaattccggcctgccgctgcccttcatcagcttcgggggcaccaacctggtctttacgctggccgccctgggcatgctcaccagcatccagaggttttccaccggcgcccagcccaattgtgaaatcacccgcaaagacgaacgctccattgacgtaagattatgactgaaccctctctcaaacatccctccctgaacatcgtgatcgcctgcggcggcacgggggggcacctttttcccggcatagccgtagcccaggaacttaaaaagcgcggccaccgcgtcacgctcctcatctcccagaagaaagtggacgcccaggccagcaaaaattacggggatcttgacttccgcaccattgaggccatcgcgatgcccaaaatcccatccctgtccctgctggggttcggcgtcaggctgtacaaagccatccgtttcagccgccatcttctggacgaggtggaagcggacgtcgtcatcggcatgggaggattcacttcattccctcccgtttacgccgcccaccgcaagggaatccgcacctacgtgcacgattccaacgcgctgcccggaaaggccaaccgcatgaccgccaaatgctgcacgaacgtgctgctgggcattgaggaagccaggcactacttcaatcccgccaaatgcattgtcaccggcactccggtacgccaggaaatggtggcccggaaagacaaaaacgaagccagggcggagctcaacctgccccaggaccgccgcgtggccctggtaatgggcggttcccagggggccaggaatctgaattccctagtcattgaagccgcccggcaatgcgcagacctgtgcgactttctcatcatcaccggctccgcggactttgcacgcgtcagccagctgacggcggacatgccccacgtgcacgtcattgaattctgttccgccatggctgccgcttatgccgcagcggatgtggtcatttcccgttccggggcgtccagccttacggaactggcccatatggggaaggccgccctgctggttccctaccccttcgccgcagacgatcaccaggcacacaacgcacgcgttttcgcggcccacggcgcggcgcgcatgatgcgtgaaaacaccctcacgtcggacgatattgcggctttcctgaatgaagtactcaaggattcctccctgctggcctccatgaatgaatgtgctttacgtctggacatgcctgatgcagtatcccgcatcgccaatgtcattgaacatacggaccatgcagcctcccatgattgaaaccttacgcaaaagactgacagacagggaacacccggcacgcctacatctcatcggggtagccgggtcaggcatgtccggcctggcgctcatgctgatggaaatggggcaccgggtgagcggctgcgaccgggtgaccagcgcagagaccgaacggcttcaaagcctggggctgtctttctcctgcccgcattccgcagacgccgtttccgatgcggaaattgtcatttattccagtgccatccgggcggacaatccggccctggcggcagcgcgcaagctgaatattccctgcatgcgccgcgcggaatgcctggcagccatcctgaacgggaagaaaggggtcgtggtctccggtacgcatggaaaaaccactacttcagccctctgcgcgcacctgatgagggaaggccgcatgcgtccgtgccactacgtgggggcggaaatccccgtgctgggaaccaacgcccactggaatgaagacagcgaatacctggtggcggaaggggatgaaagcgacggcacgctggtaaattacattccggagcacagcatcgtcctcaacattgaaccggaacacctggaccactacaaggatctggatgaaatcaaggccgtgttcgaccggctttgctcccagacgcgcggcaagattatttattgccgcgcgcatcccggcgctgaggatgtctgcgccaagtaccccaattccgtttcctacggctggtccgatgcggactacaccgctacggacgtgctggaacgccgcggacgcaccctgttcaccgtgttgaaggggaaagaggaactgggccgcgtggagctgggcatacccggacgccacaatgtcctgaattccctggccgcgattgctctggcaacggaactgggcgtggatttcccggcggtgatgcggggcctggcctcctttgcgggagccaaacggcgctttgaaaccaaatacctttcctcctccatccggattgtggacgactacggccaccacccaacggaaatagccgccacgctccaaactgcccgttccctccagccgaaccgcctggtagtttacttccagccgcaccgctacacgcgcacgcagcttctggcggatgacttcggcaaggtgctccaggaggcggacctcgttttcgtagcggacgtgtatcccgccagcgaactgcctattgaaggggtaagcgggcagacgatcatcaacgccatgcacaggcacggccccgtggaaacccgttaccttcccgacctgggcatagcccaccacaccatcggcaacgcgctgaaacccggagacctgttcctgacgctgggagcagggaacgtccatgaatgcggcatgcgcatcgcgcgcgacctggccctgctggaggatctggaacgcactgcgggcggttctctggaaggcaagctgtacgaacccatgtcacgccataccaccatgggagtaggcggatgcgcccagtactggctggagccttccaccttttccggaatgcaggcggccgtcaactattgccgggacaggaatatccccgtacacgtcattggccgcggttccaacatcattgtcagggacggcggactgcgcggcgccgtcatccacccctccgggggagaattcgatgtgctggaaatccaggggaaccgcctcaccgccggagcgggcgtgcggttgaaaaaactggtttccaccgccgtccagaacggccttggcggcctggaatggatggacggcattcccggcaatgtgggaggaagcctccgcatgaacgccggagccatgggcatggatatggtcaaaaacctcgtttccgtcacctgtctggatgaagacggggaaatccgcagccatacaagggaagaattgaacgtccagtaccgttccattccggacctggtccacaattttgtgcttcaggccgtgtttgaggcgcagcccgcccctgcggaagaaatggagcgtcttctggaggcggcacgggccaggcggaagctttcccagcccgtcggagccagcgccggctgcatcttcaaaaacccgccggaaatcccggcaggcaggctcattgatgaactggggctgaaaggcgcctgcgtgggagacgcctgcgtatcagacgtgcacgccaattttatcatcaaccggggtcatgccagagcgagggacatcaccatcctgatcgacatgatccgcaaggaggccaaggaaaaccgcggcatcgacctgaaatcggaagcccaggtcatcggagaccgggacccccagttttaacccattcattatttattccaatatgaacactctcaagcgcgacctcaaaatcgccctcctgctcggaggtcccgggtcagaacgggaagtatcccttgtttccggcaactccgtttacgacgccctgtgccgggccggattcaccgatgtaacgaaggtggacgtgcacggcccggatttccggctgccggaaggcacggagctggcctacaacattatccacggcactttcggtgaggatggaaccctccaggccattctggaagaatgcggcgttccgtacacaggggccggctcccgttccagcgccctgtgcttcaacaagtcagaatccaaaaaagtttttctggaagccggagttcctacgccgcatgcggaaattctggactgttcccatggcatcgtgatgccgtccctccccctgcccttcgtcatcaagcctccctgcgagggttccagcgtgggcgtccacatcgtccgcaggcaggaggatgtgctccccgccatggaggaagccgtaacccacggcaccaccgtattggtggaagagttcattcaaggcaaggaactgacggtcggcattctggacgggaaagcccttcccgttattcatatctgcccccgttccggcttctatgacctgagcaacaaatacccgtggatgaatatgggcggcggcacggattatatttgcccggcggatcttccggaagaaaccgccgccaacgtgcaggaggcggccctgaaagcctacaaggccgccggagtggaagtgtacggccgcgtggacgtactgctgcgcgaggaagacggcgcccccttcgtgctggaaatcaacaccattcccggcatgaccccttccagcctgcttcccaaggcggcggcggcctccggatggccctatgaagacctctgcgaaaaaatagcggaattatcgctagtcaccccccgtaaataacgtaatatttgacagagggcggggagtcgcccctcccgcaccccccgatgtcgcacaaagccacaacgccagtcccccgttccgccaaaaggccggaaatgcttcttctggaacgggaggccagaaaagagaccatcgaacgcaagggcaaaaactaccgtttttggctcttccggcgcaagctgtaccacattgtcaccgtttacgcgcttattttcggcttaatcggggctatcgtttttctctggaaagattacatcctcaaatacgactggctttccatcgacaccgtcaccctgaaaagcaacggcattttcaactctgagcaggccttttccgttatgggcatagggccgcaggacaacattttttccatagacgccgcggagctggagcagcgcctgaaaaaatgtcccgccatccgccgggcttccgtcaaacgccagatatcctccaaccccacgctgctggtggacattgacgcgcgcatacccgtggcctggattgactgcccggaactgggaattcacccgggagatgccacgtacggcgctttggcagacaaggaaggcgtcatcttcccctgcatggagcaggtccacatgccttatatccgggaaaagcgcatgccctccgtcacgctcaggccgcccagttccggcaaactcagctacggcgtcagcatccgggaactggaagcgcccatgaaactgattgaactgctttccggcacggtaacggaataccttcccagcatcgtctccataacgacgcccaacgactggtctttctgtgtgcgttttaccaatgactgccaggctactttcagccattacggcctggaacaccaggtggaaaaactgtcccgcgccctccggcatgcacgccagacgcaccgcaaaatcagttccatcaacctgattccggagcacaacattcccatcatctttgacaattcctacgaggatattcctcttgcggagccgattgaagaataacgcccccagacgttctccggaaaaaccgtgttcttctccggcaccaaacttcttttccggttccgttccccctgtttcccctaatttcccgccgaacggaacacccggttttcacaagattcttcccatgtcagaattctgttctttctcaatgaggaatgagtctgcgaagacccacagaacacttgccaataaggctgtcccggttatactgcgctacgatatatgagcaacgaaacacctttatcccccgaagcggaaaaactggcggcagcccgcaagcgcaaccttgacctggccctctcccaaatccagaaagacttcggagaaaacgccattatgcgccttggagacaacgtcaaaatggaagtggacgtcattcccacgggcaaccttctgattgaccgcgctctgggtgtgggcggctttgcccgcggccgcattgtggaaatctacggaccggaatcctccggtaaaaccaccctgaccctgacggccatcgcccaggcccagaaatccggaggcctggctgcattcattgacgtggaacacgcactggaccctcagtatgccgcccgcctgggcgtgaacctggacgacctgctggtttcccagccaagttccggtgaagaagccctgcaaatctgcgaggctcttgtccgctccaacgccattgacgtcatcgtggtggactccgtggccgcactggtcaccaagcaggagctggaaggagaaatcggggattccacggtaggagcccaggcccgtttgatgtccgccgccctccgcaagctcaccagcttcatttccaaggcccgtaccgtctgcatcttcaccaaccagatccgtgaaaaaatcggcgtcatgttcggcaatccggaaaccacccccggcggccgcgccctgaaattctacgcctccgtacgtgtggacatccgccgcatcggccagatcaagggcagcgacggcgtcatagccgggaaccgcaccaaaatcaaggtagtcaaaaacaaggtggcccctcccttcacggaatgcgaattcgacatcatgtacaatgaaggcatctcctccgtaggcagcctgctggatctggcaacggaatatgatatcatccagaagcgcggctcctggatcagctataacggcagccagatcgcccagggccgcgacgccgccaaggaagctctcaaatccaacccggagctgtacgcggaaattgaagaacaggtcaaggccaaaatggacgagaagaccgccaaataatcccgcctgttcccgttcctttactgccatttcagggcggctccccttcccgggagccgcttttttctctccggaaacagaagcgcaaaagaatctttcacggaaacttttcccttgtgcgtcatgaaaaatccgttagtctggatgcgatatcgtcctatgtatccgacctctcgcacatcatttgcagccgtgctcggcattgtgggcatgtttctgctgacgttgtccacggccttcggatggaatccggaaatcattaatggagtgcagtatattccgatgtcagaagtgcgcacccattacaaactgaccagggaacgcacggaagggcggcagaaagtttacgaggtgccggaaaagattcaaatccgtatccaggcgcgcagccaggagatgttcatgaacaacatgaagttcgtgctgtcctatcctgtggctgaccatccctccaaggggttgatggtttccaatatggacctgcacaaaatcattgatccggttctgcgtcccacttacatcgccaaccgccgcagtttcaacacagtagtcattgatcccggccacggcggacatgacagcggcacgcgcaaccgcatcagcagggaagcggatatcaacctctccgtgggcaaaaaactgcgtgatcgcctcaaagccatgggctaccaggtggtgatgacccgtgacacggacaacttcattgccctccaggaccgcgtccgcattgccaacaggcacaacaacgccatcttcatcagcatccacttcaatgacgggggctcctctgcccgcggggtggaaaccttcacgctggcgcccgcgggcacttcctcctccatgtcccgcaatatccgccacgacgctctgcagggcaacgcccaggacagcatgaacatcgccctggctacagccgttcaggggcacatgctgaaagggccgcttgccatcaaggagggtatttccatggtggaccgcggcatcaagcgcgcgcgctattccgtgctgtgcaccatcaagcatcccgccattctggtggaaggcggtttcatgtccaacccgcaggaggccctgcttatcgccacggagcgctatcagaatttcatggcctcttccctggccgccgccgtgcatcaataccgcaccgcccttggccggcaagtgcgcagaacgcgctgagttccctaactgtcccggggcctcccttcagcagcatgaacatcatccgcattcccggcctggcagattaccaggaaaccctgcggctccaggaacaactggttcaggctcatcaggaagatccggacagggaaaacgacctgttgctgctggaacatgccggggtttataccatcggacgcacgcggaatcatgccagcctgcaccccggttccgtacttccctttcccgttcatgaaatcaaccgcggcggccaggctacctaccacggccccggccagctggtcggataccccattacggacctgaaccgctgcggcagggatctgcaccgttacgtcaccaccctggaaaacaccctgattgaaacctgtgcccggttcggcgtgcaggcccgcatccgggaagggctggtaggggtctgggtggaaaaccgtaaaatagcctccatcggcgtcggggtgaaaaaatggattgccatgcacggcttcgccctcaatataacccggaaatccctgcctcccttccttgctattaccccctgcggcatccagggcgtgcaaatgacctgcctggaggatgaaatgtcctacccactgccggaaggaaacctgttgaaatgtttcggagacgtttttgcagcactatgggaagaaaaatttaaccggtattaaaggaattcggaacgtgcggagggcatgaaaaccatcctttccttgaaggcggaaaggccccaaaggctggaaagaggcccattcagaccatgaatgcagaggaaatgttcaaaaaaacgccttatgtaagacacagaccgtgtcagcaatacgtccttgcatcttgacgcggttcccgaacggacggatgcttatgtcagttatggggaaaacgcttttccaaaaaatctgggacgctcataccgtcggcatcctgccggatgggagaacgcaaatgttcatcgctacgcacctgctgcatgaagtcacctctccacaggctttcggaatggtccgggacctgggcctgaccgtgcgccacccggaacgcacctttgccactgtggaccacatcattcccacagacaaccaggcggaaccgttcgcggacgccacggctgacgccatgatcagggaactgcgccggaactgcgctgaaaacggcatccgctttttcgacctccctaccgggctccagggcatcgtgcatatggtagggccggaactcggcatcactcagccgggcatgactatcgtatgcggagactcccatacggccacccacggagccttcggctccattgccatgggcatcggcaccacgcaggtgcgcgatgtgctggctacgcagaccctggccctcagcccgctcaaggtgcgccgcatcaatgtgaacggaaagctggcccccggcgtgcgcgccaaggatgtagccctgcacatcatcggccttctgggagccaagggcggcctgggcttcgcctacgaatacggaggcgaggtcattgacgccatgagcatggacgaacgcatgaccctctgcaacatgtccattgaaggcgcggcgcgctgcggttacgtgaaccctgaccggaccacggtggaatacatcaaaggacgcctgttcgcccccaccggcgcggactgggacaaggccgtggaacgctggctgggctttgcttccgacgcagatgcggaatatgatgaaatcgtggaaattgacggagcttccattgagcctacattgacatggggcatttctccggaccagaatacgggcatcagcggcagcacgcccaacccatccgacgcagcggacgacgatgaacggaagatgatcaatgaagcgctggaatacatgaaattccccgcggacatgcctcttaaggggctgccggttcaagtgtgcttcgtaggttcctgcaccaatgggcgcatttcagacttccgggaagtggccgccctcatcaagggtcgccatgtggcccccggcatcagggcactggccgttcccggctcccagatgactgcccggcagtgtgaagaggaaggcatcgcggacattttccgtgaagccggctttgaatggcgcctggcgggttgctccatgtgcctggccatgaatccggacaagctccagggtgaccagctctgcgccagttcctccaaccggaacttcaagggccggcagggaagccccaccgggcgcaccctgctgatgagtccggccatggtggccgccgctgctctgaccgggaaagtctccgatgcccgcgaagtgttctccctgaattaactttccaattttttcctttatgtctctgacccaattcacctccatcaccggcacctgcgttcccgttccgggaccggacatggacacggaccgcatcatccctgcccgcttccttaaatgcatcacgtttgacgaactggcgggagtcatgttctgggacgaacgcttcgatgaaaacggacaatccaaatctcacccggtggacgatcctcgcttcaaaggggcttccatcattttgggcggctccaacttcggctgcggttcctcccgtgagcatgccccgcagacgatcaggcgctccggcatcaaagccgtcattgcggaatctttcgcggaaatctttttcggcaacagcaccggtatcggtttgccctgcgtgtgcgcgtctgccgccgacattgccgctctggcccggcacatttccgatcacccggaaacggaagtgacgattgacctcctgaacatgacagtttcctggaaagaagggtccttccccatccggatgccggcggaagcccgcgaagccctgacccggggccgctgggattccattgcggaactgcttgtcaacatggacgccgtagaaaagaaaaacaaggaactgccccaggtcgcagcctcctgctgattcagcattcacctctttcctccccttctatcccccttccccatatgattttcagaattacagactacgtccactacggcacgctggacaaccgtgaacgcggaaccgtccgccttacgctgcagctcatggggatgccccatccggtaaatatcaccctgcagggggactgcctccaggatctggccggttgcgtggttgatttcaggaatccctctccccagacccttcccgcggaacttacccagatcccggaacatatccagggtgtggcgggagacatgacggccagccgccgcatgcctgtcaaaggcaggaaaaccatggaaaacgccctgtacctggaatggttcaccagccaccatgacatggtgctgctggaaagtacggtcttctccatcaaagtctccctccccgaatggatgatggattcctgcgaagagcaggcccagatcatggcgaaccagcagatgctgcggacccaggtaaaggaatggtccagggcctattccaaccaccaggaggacggaagcctgcccgaccaccattgggacaaacgcctgcgggaggcggaagccatcgccatagcttaccaggaggtattccagaaatacaggctgaaccccagcggcgacatccgtgtggcttttgtcatgggctgggatgaagtgctggacaacatcgcccagtcggaagaaacggggacgccctgttcctgcaaaagcaccggcatgctcagcctgtttgacatcctcaatgaacaggaggcccgggaagtgcagtcctgcatgtttcatcctcttttccagcaggtaatggaactgacggatctgtgccagcaccggttcagccgggaaatcaacaaggcccagaggaacaggacagggccgccggaacccctgaaccagattttttactgcatccgctacatcaccccccgcattctttcctgcctcctccaggagaaggaggatgctgcggactactgcaccatggccgcccgtatggccctgtgcgtggaacaaacgcgccggacggtagctgccctggacaactgcggctaccaggtggacggtgaaatagcggaacgtttctcatccctgctggaggaagtcaattccttccaggaaagtctggcaacccaaagccgcaaaagcaacctgtaacaacaaaaccttccctggcaacacaatctttatctttgcgtatgatacattcccacacctgttttcaagggctgtgcgcagtcctggccggcgccgctctttcccacgcggatgagccggctgtttccatttcggacttcggggtggacaaggtcatgtccggccctgtcgtctccatcaatgaccaatacaagggcgtcgtaaaaattgagatggattccctgactccggattacgctactccgtggaataccggccgctaccagggaggcatcggcaccggtttcctgatcggggaaaacgctttcatgacaaacgcccatgtggttagcaacgcggagcgcatttatatctccatgtacggagattcccgtaaaattcccgccagggtcaaattcatcgcccatgacgcggatctggctctgctggaggcggacgatcccaagcctttcaaaggaatacgtccttttgaattcagcaaaaacctgcctcatctggaagacgaagtaagggtgatcggctaccccatcggcggcaacagactttccgtcacgcgcggcgtggtctcccgcattgatttcaccacgtacgcccacccccgcaacacggaacacctgaccatccaggtggacgccgccattaatccgggcaacagcggaggccccgtcctgatggggaataaagtcatcggcgtggcattccagggcctgaacaacgccaataacacgggttacgtaattccaacccccgtcatccgccactttctggaagacatcaaggacggcgtctatgacggttacgtggacatgggcattcaggctgcgcccatcctgaacccggccatgcgcaaggcgttcggcctgccggacgacgaaaagggcgttctgatcggcaaggtgctcaaggggtcctccgctgacggcgttctccgtaacggggacctgctgatgaaagtggacggctatgatgtggacagctctgccatgattgaactggacggccagaaaatcagcatgaaagaactcattgagcgctgttttaaagacgaccggctcccgctggatatcattcgcgacggcaagcccatgaaggtggaaatggtgatgaagccatccccctccagagaccttctgatggcggaatacgataaaatgccccgctacgtcgtctttggcggcctggtgttccagcccatccagcgcaacgtgctcgcggcggcggacatctccatgctggacgttgcactggacatccgtaattaccaggaagacggcggctgcgtggaccatgaagacatggtaatcatcaccaaagtgctggatgatgaggtaaacgcgcgcctgtccggctccatttccaattctattgtggaaaaaatcaatggcgtgaaagttaagggccttacccacgcctatgaactcctttacccggagaacatgccggaatacgtcgtcatcgaactgaaaaacggagaacgcccccttgtctttgaaggcaaggccatggagacggccaacaaacgcatctccaaaacctacaacatcccgaaaaacgcccgcctggacagctccattcccggtcgccagtctggccgcaacaccactcccgcccgttaaccgccatgaaaattctttccacttttttcttcggttccctgatattgctctgcggttgccagccgcgcgaagccggacgaaccgctcccgaaccccagcctgaacaacagacggaaacgcctgcggaacaggcggaggaaacgccctcgccggccccgcttccctcccccaccagctccatggtcggcattaacgccaccaaccagggctatgccatgattcagccgtggagcaaggaaaacccggcgtacagtcagggcttcggcatttatctgggagacggcaatatcctgacggcagccaatatcgtttattccgccagcttcgtggaagtaacctccgcagacggagcccagacggttcccgtgacagtaaccgcctttgacccggaagccaaccttgccctcctgcgcctgaaaaacggaaaagatgccgctttcctggacaaactggtccccgttacgctggggaaggctccccgcctgggcgacaaggtaaccttctggcaattcaatgatgacggccttcccatcaccacctccggaacccttctggcgacggaaagcgcctgcccgttcacgaacggggaaccgttcgtcctgtataacgtcaaatcctccgttactcccctgaaaggcggcgcaggcaaccctgtcatgagaggcaatgaacttgtgggtctcagcgccagctgcgatcctcccgcccagaaagttctggccgtcacccataccatgatttcccggttcctggagcaggcccggactggcaactacatcggttttccggcggacggcacccaggtcacggaactgaccgaccccgttttccgcaaattcctgggcctgtctgaaactggcggcggcttttacgtggtgaaactgcctgtttacggctctttctacaaagccggagtgcgtcccggagacgtggtggaaagcgtgaacggcattcccctggacagtaaaggattaatcaaggatcccgcgctgggccccgtttccgccaatttcctgttccgtgactccgccaaaccgggggataccattacgctggacatccgccgcaagggaaaggacggctccagccagcccatgacgttggacgtcaaactggacaggagcgctattgaaggcgacctggtcaatccggcccccttcatctccaatccgccctaccgcatttacggcggcctggtatttgtcccgctgacgggagccatgatgggagaaatcaacaagctcagcaagaaccatccacccctcaacctggtggaagccactcaaaagaaagaggacatacggaaaaaaggcgtggatgaaatcgtggtcttcctgatggccctgcccacccaggctacactgggatacgcccagatgagcccctccattgtggaaaaagtcaacggcgtgcaggtgaaaagcttcaagcacctcaaccagcttctggaccttcccgctcccggcggcacgcaccgcatcgaagtgacccagcagccgtacaccatgtacatgtcccagaaggaagctgccaaagcggaccgattcatccagatgagggccgttcccgtgctccgcagggactaggaatccgcgagccatgttcatttgcagccctcctggcatgtctcttcacacgctgaatatccggcttgattttccctacaggacaggctttacccatggagccttccgcccggaaaatgatgctctggccagcctgatggaacagaggcccggaagccgcgttctcgttctcctggaaaaagggctggaacagttttatcctcagcttccggcagacattgaccgctattttgaaaaaaatgccggggtgctggcctatgccggctgccgttccgttccgggcggggaggaagccaaaacaggtttttccgcatgggaaacggccctgcgccacattgtggaagcaggcattgaccgccattcctatatcatagccgtgggcggcggagcgtttcttgacgtagcaggctttgccgccgccaccgcccatcgcggcatccggctgttgcgcatccccaccaccaccctctcccaggcagactccggagtaggtgtcaaaaacgggatcaatttcatgggccggaaaaactatctgggcaccttcgccgtcgcgtgggccacgcttgacgacttcctgttcctccattcccagcccctccccctgaaaagagccgggctggcggaagtagtgaaagtggcggtggtgaaagacgcctctttcttcaactggctggaaacgaacgcctccgcgctggctgtatgcgaacgggatgctctggaatatgccgtggagcattccgctctgctgcacgcctcgcacattgcatgcggaggagacgcctttgaactgggttccagccgtcccctggacttcggacattgggccgcccattacatggaaaccatgtccggttacatactggggcacgcggaggccgtttccgtgggcatgtgcctggatatcctttattccgtccggaaaggatggctgcctgccgcggaggcggaaagaatcatctccgtgctgaaaaccctggaactgcccgtattccaccccctgctttcccgcaggacagaaaacggcgcctgcgaagtgctgaaaggtctggaggccttccgcgaacacctcggcggtcacctgacggtactgatgcttaccggaataggccgaggaaaagacgtccatgagatagacgccgctctgatggaggaatgcatccgggaaatgcaggaagccgctggatattccgttcaggaataacagccctttccttgccgcctccccgtcagaaaacaagcagaagccatctggcgtatcacagagaaataccagccggacggcagtatgaaaaaaacaacgatgtttttccttcccacaatctccatatcctcctgttccggcagttcccgcagggcggcattattatgtgctgccgggcagcccatgatgcaagccattttgcgactcccccttttttcataacgcgccggatttacttctcctttttcaaaaagaagatgaaggaaaaagcatgaacagcctgccggatacctcaaagagaagatcatccgtcaaccatgcggaggcagtggacacgatgcctccctgggaacaaatccattcatcgtctttgcaaggcactggaaaaccaaactgccggaaaccgcgttccgctgaaaattcagggatggatcttccggaaaaccgtccctcttaaacctgtgcggataactccgcaggaaacggaactttcccgtattcgtccaaactgacgccgggccatccccatttacagacgcggtacggcggcgagaagcgcctgcgtatattcgtgggaaggggaagaaaatactttgtccgcctccccgtattccacaatgcggcctttgcgcatcacggcaatgcggtccgcgatgtaatggaccacggacaaatcatgggaaatgaatatcatggtcaggctcaagtcgcgggccagggcaataagaaggttcagaatctgggactggatggaaacgtccagcgcggaaacgggttcatccgcgataaccagcctgggttccggcgccaatgcgcgcgcaatggcgacgcgctggcgctggcctccggaaaattcatggggatacttgcgcatcagggaggggctcagccctaccttttccatcagttccgccacatcatccctcgtctgggcaaaagttcttttacggcggctctgcaacgcctcctttaatgttgcatataccgtaaaacgggggttcagggaagcataagggtcctggaaaaccatctggaaatccggacggcgcttcctgacttcggatgcggaaagagccgtcaactcttccccttccagaaaaatgcggccctccgtaggcttctggagcagcatcaccgtgcgggacagcgtggatttgccgcaaccggattcacccaccagccccaggatttctcccttttccacggacagcgacaccccgtccaccgccactacgggggcagatttgcgggcagagagcagcccctgcaccgcaggaaagacaacgctcacatgatccagttccagaaaagccatgccgccaccctaacaagccttccgatgcaagacaagaccccagccgcgccagttcctccaatatcaggacatccatgcgcacctcccatgccgtttcccccacagaaaaaccaggaccggcaatgaacgccagccccggctgggcatttcgcatgtcttccggagccacccggaaccagaagggttcatcatcacacacgaggctgataacagcaaaagaggctgttcccccatttccaccatccattggcctttttgaagaactataataccgccaagaaatatcagggaccgcacacaaggaaaaaacacgctccagcccaaaagcgctccaaaaacggctgccaggatgaaggccgcaaccagcagcagggccggagcttttctatcccgcatattttgatgatcccctatccggatttccggatcctccctgaatcaaatttatggataaatccccccatggagccatatcaaacaaaagaaccgttccccgcaaagggaacggttccagagatactctgactcagagcttacgcaccgagctggtagcggacgaaggaggcgacggagatatcgtcgccgagttccttgccggcctggttgaggagggcctccaccgtcatctttccggcagggtccttcacaaatacctggttcagcaggcaggactgggcgtacagagccttcagcttgccgggaagaatcttttccagcaggtgttcgggcttgccttcctgaatgagctgctgcttggcgatttcctgttcctcggccacgaaggcgggatccaggctatcggagctgacgctcttgggagcggcggcggcgatgtgcaaggtcaaatccttggcgagggctttgaacgcatcagacttgacggtttcttccttgccggccttgatggacagcagaacgcccactttgccgcccatgtggatgtaggagaccacggcgccgatgccgtccgccgtcaggcgggcgaatttgcgcagagccatgttttcgccaatggagctgcacatggccttgatatattcttccgtggagccttccgccatggggacctggagagcctcctccagcgtggaggccttggaatccatgagagcgttggcaacgtcattcaccagaccctggaacttgtcccccttggcgcagaagtccgtttcacagttgagttcaaggatgatgccggagcagccgcagggagccacagcggcgcggatcacgccttccttggcgtcacggtcggccttggccgcagccttggcaattcccttctcacgaagatactttacggcggcatccatgtcgccgttgcattcgttgagggctttcttgcaatccatcatgccggcgtccgttttgtcacggagggccttgacgagagctgcagtaatttctgccatagtgtttctgttctttctaaatggttggtttaggcttcggcggatgcgcccttgccttcgttgatggccttgacaatgcagtcaagaatcaggcggatggaacggacggcgtcgtcgttgccgggaatcgggaagtcgatttccttcgggtcggcgttggtatcaaccagaacgcagacgggaatgttcaggcggtgggcctcgcggatggcgatgtcttcatggtcggcgccgatggccaccatggcgtccggagcgccgcccatgttgcggatgccctgaaggttgcgttccagcttctggcgttcgcggtccagagcggccagttccttcttggacatgctcttaaattccgggctcttttcaatcccttccagatagacaaggcgttcaatgctcttgcggattgtgctcatgttggtgagcatgccgcccagccagcggtggttgacatagtactgaccagtggcttccgcagcttcgcggacggcttcctgagcctggcgcttgcagccgacgaagaggattttcttattgcggcgggccagatcagccaggaaggagcaggccttgtccaggcatttttccgtttcctcaaggttgatgatatggataccggccttgtccttgagaaggtactttttcatgctggggtgccatttgcgggtctggtggcccaaatgaacaccggcttcaaccatctggttaatcagatcattaatcatatatgtatgtaggtggctttccttgcggcaggaaaagcagtttttggggacttcgacgctttttacccctccgatccccgttgtttagttgcgccgaatcacgcgaggggcgggcaatatacttcccgccccctctcttgtcaaagcataaatcattgatttacgaaactattccgccgttcgcggaaccttgtcgcaagcaagctcatggagaactttgccatttcagcaaaatatcttaccgcgcaggcccgtcaaaaccgttcccggcagactctcccatgcccgttttccagtattcccgttccgcttgcaaataaaacgcaccgaacggagggaggatttttaacgttttcccatgccgtgcggccagttccgaagagggcatgtcctcccgcatatgcttcccttttccaatcaggaacggcagcactaccaccttttgcccctttaatccgggtaataccttttccacagaaggaaatgcgccaaagtatgcaagcgccatgtccgttccttccggaagccggaatttcaactgctggaggaattgcgccggctcaggggcagcctcccttcccgttaccccgtgggctaccaccagcagggaagcctccccctccaattccttttgcaaggcggcggccctaaaaccaacaccgccgcatcccgctccccatacgggtttaaaaacaagttccggatgctgcccgctcccggcatacagcgcacgaagcaattccggcaatgtctccgtcaccgtcacgccgctctgcatgaagacagggtaaacccagactacaccatcgcccggaggcaaatccgccgccgtcaggctgcggaaagacgcctgccagacacaatcgcttgaatattgaaactgctccgccacatgctgccgcaattcagcccctgcttcatcataggaaataaagagtttgtaaatcttcctgggcatttcggtaagaccactgcgggggaacgacgttcggaacatcctgtcatttattcatgcggaagtaacgcatgatggccgtttgtaacaaaaagtccggagggcggcaactccatacgcttttttccaatccatgctcccctccatttacacgcacctatctaaaaaatatttaccatatttataacaaaatcattatatcgaatataaaaagatacttccggaaaaataaaccttcgcctccgaatctccgcgcggaggcaggatagcggcttgaccgaaaggcctgaaaccgtcatgatacaaggacatacaggttttgttttatgtcgttttacattcaatccgttgaaatcggcggcccgcggccgttctaccttctgggcccctgctctctggaatgcgaatcctttgtatgggagatggcccgctccatcaaggccatcgcggaaaacctggatgtcccgctgattttcaaagcttcctacgacaaggcgaaccgcacttccgtcacctcttttcgcggtcccggcgtgcgggaaggctgccgcattctgtcggaaatcggcagggagctgaaactgcccgtcgttacggatgtgcatacggcccaggaagcggaaattgccgccgaatacgtggatctgctccaggttcccgcttttttgtgccgccagacggatcttctggaagcctgcgccaagagcggccggcccgtgaatatcaaaaaagggcagttcctggctccgtgggataccgtgaacatcggggaaaaaatgcgcgccttcggctgtgacgaattcatgatgtgcgaacgcggcaccacctttggttataacaatctggtggtggacatgcgctccctgtactggatgaaacaggaaggctttcccgtcatattcgacgccactcacgcagttcagaaacccgggggattgggaggaaccacgggaggagacagcgagctggcccccgtgctggcatccgccgccatggcgacgggcagcattgacggcgtgttcatggaggtgcacaaagacccgtccaaagcgctttccgacggccccaaccaaattcctctccacctgcttgaaggagtgctgaaacgccttcagtccatccaccaggcggttcagtcatgatgaaattattgtccacatgctttttgacggccgccctgtacggcacggaggcgcaagcggacaccagcctgcccgcagccacgccttttgccggcgtagataaaaaattacctatgctggagcttctgcccgtaggccaggtgctcccaaaagtcagcctgtcacgatatgaagggccgcgcctttccatgctgctgacggcttcaagcgtgaccgtggccgccccgcaggaaattgccgcgaatatcctgaacgtgtacttgtacggaaaaaacaaccagacctcccaccttttcacgcgggccgcctcttattttctggataaaaaactggccgtctcccatacggaaaccaccctcaaggaagagaatctttccgccaaagggactggcctttacctggacaccaatatcaagaggggcatcattctgggtcccgttcaaaccaccatccgcatggctcaacgcaacaagtaaccattcctttttatgaaaaaactttcctccctgctgctggccctggccggaagccttgcctgcagcggcgccaacggcgttccctcccacattgtccagcccctgcccagggaactggatccccgcctggaacaacccctcaccccgcctccccatattgtacgccccctgacggcggaagagacagcccggagggaacgggaactggcccctgttccgaccgcaggcttgaaggaagacggggaaaaagcgattcaaacatacagcgcgcaggaaaaaaccgtggacgggcggattcaggaattccgccagcagcaccaggttgccggaaatacccccgccccggctgcggaaactactccctcttccgcagcatccggcccggaggaaggcttcctgcaggccaattccccaaaagacctgtacaccgtagagtgtgacggagacttgtacttcgatatggaagaaggcgttctggtgttcatgaaaaatgtccgggtgcgcaaccccggcctttccatggattgtgcggatcatctgaaaatttatgcggaattcgtgccgaagaaaccgggcgacaaaaaaccctccgacgtcaagaaggaaaaggggaaagaagaaaatcagactcaggtggctcttcccaacggaggcaatttcgactacaattccattaaaacggttgcggcttccggaaatgtgaaagccagttacaccaacaaacagggagaaacaagcaacgcccaggctgaaaaaatcacctacaacgccaaaaccggagaaatcatcctgacgggtgccccggtcatcgtcactccggacgtcatcgtgaaaaatccgaacaaggatgctttcattcgagtgtactccaacggaaacatgtacggcagccgcggaaccaagactacgttccgccacgtagacaaaaaactttccgaccgggaaaaccagaaaaccagccgcaaaccgtgagttcgttccactcttctcctttgctaagcgccgaaggcatctgcaaaacctacaaaacgcggaccgttgtggaccaggtcagcctgaaggtagggcatggcgaaattgtgggcctgctgggaccgaacggtgccggaaaaaccacttccttttacatggtagcgggtctcgtacgcccggatgaaggccgcgtgatttttgcggacgaagatattacggaattgccgatgaacctgcgagccaggcgcggcatgggttatctgccgcaggaagaatctattttccgcaagctttctgtggaggataatcttctggccattcttcagacccgcaaagacatgacttcccgccagcaaaaggaccgcgccgtagagctgatggaccgcttcggcatcaccaagctgcgccgctccatggccatccagctttccggcggcgaaaagagaaggctgaccatcgcccgcgccctggctaccagccccaaactgctgatgctggacgaaccgttcagcggcgtggatcccatcgccgtttcagacattcagaaaatcgttatggaactgcgcgatacggacggcctttccatcctgattacggaccataatgtgcgggaaaccctccacatcgtggaccgcgcctacattttgtttgaagggaaggtgatcaagcacggtacttccgaggaaatcgccaacgaccccatcgcccgcaagcagtatctgggcgaccagttccgcatgtaactttattttccgtctttcccatgtcctctccgcagaatacgatcgccctggttttcgactacgaccagaccctgagtcccttctacatgcaggatcaagccatcttcccggaattcggcatttctccgcaggaattctggaccaggtgcaacgccaccggagaaagagaaggctgggacggagaactgatttacatgaaaagcctgctggacgccctttccctggaccgcgtcagcaacgcccggcttacccagcttggagagcgcctcaccttttaccccggtttgccggacttttttaacgcgttcccgtccatgaccctctcctcccttcatacggatctgggcatcagcattgaatactatatcatctcctccggtttgaaagccctgattgacggttccgccctgcgcccttatttcaaggccgtatttggatgcgaattcagcgaggagaacggctacatcaattttcccaagagagtcatttcccacaccacgaaaacccagtaccttttccgcatcaacaagggaatgctggattacgaccaggacgtaaacgaccacatgccggaagacatgcgccccattcctttcgccaacatgatttacatcggcgacggccctacggacgttccctgcttcaccgtcatgcgccggaacggaggccacgccgtagccgtatataatccggaagatgaaaccggccgcagtttccgcaaatgctataacctggcctccaattccgaccgcgtgaatttcatcgccccggcggattacacgcccggcagccatctcacccgcctgctgtccggcatggtcacggatatcgccaacggcattgtgcgccgccgggaccgggctctggcggattcctgtattgcggctccttccttttccaaataaaacccgctccattcctctccccgtcatgaacagccatttccactttctcggcatctgcggcaccgccatgggcgcggtagccgccgccatggcccgccgcggctttaccgtcaccggttccgacgccaacgtctatccccccatgtccacttttctagaggaggaaggcatcaccctgtttgaaggctacaaggcctccaacatcccgccggatgcggacgtcatcgtcatcggtaatgccatgagccgcggcaatgaggaagtggaagccgtgctccaacggcgcctgcgttacctttccctcccggagacgatgaaggaatacttcctgcgcggcaagcgcaactatgtggttacaggcacccacggaaaaaccaccaccacatccatgctggcgtggctgatggaggattccgggctgaaccccagcttcatgattggcggcattgcccgcaatctcggacgcgggggccgttttacggattccgatttttccgtgctggagggggacgagtacgacacggcgtttttcgacaagcgttccaaattcctgcactacctcccggaactggtggtcatcaacaacattgaatttgatcacgcggatatttacaattccctggaggaaatcaaactgagcttccgccggctgacccagatcatcccccacaacggcctggccctggtcaacgcggacgatcccaactgcctggacgtggttaagggggccccgtgccccgtcaagacggtgggcttttccgactcttccaacatccgtatcctggatgtggagacctccacggacggcagccatttcacactggaaggaacccggtactacgtaccgatgattggagagttcaacatccgcaacgccgccatggcaattgcagccgcacaatttgcgggactgaacgtcaagcagctggcggattccatgagccgctttgaaggcgtggcccgccgccaggaagtcaagggggtagttaacggcatttccgtagtggacgacttcgctcatcatccaacagccatcaaacaggccatcctgggcctgcgccagcgctatccggaatcacgcatctgggccattttcgaaccgcgctccaacaccacacgcagaaatatcttccagaatgaactggcgttgtccctcgctacggcggatttccctgtggtagccgccgtggatcatccggacaaggtggctctggaggaacgcctggatctcaccaaactttccaacgacctttccgcgctgggcaaggacgctctgattggcggccatgcccaggaaatcgtctctgccgtctgcaagaaagcccagccgggagacgttattctggtaatgagcaacggcggttttgaaggcattcacgccaaattgctggaagcactgaacgcctgacccttcttcatacatccacttccaatgaaaaacgcatccaccatcaccgccttcatcatcagcttcctggtcgtaggcagcctggccctggttttcctgttccttgacaataaggaagaggaacccgccgccgctgaaccggcggcgcaaacggaagtgccggcacgccagacggtaacgccccaacccaccgtcgacccgcttaccaaggaagatatcagccggcagacggctacgccgccctccctgatcaatctcagctccccccagacactggcgcaggcaattgccaaagtcattcaggaccgggatgaggacatcctgaaatccctggaaatccagcaggccgtgacggagaaccagagtcgcctcatccgggagctcatggaagcccgccatatacgcctttcctctcccggcatcaccagcatcggcgcgaacaaccagggggccaatcccacagccagatacacgctcaatttcagcagcggcgcgcgcggctacctggatatgaagcgcaatgacaagcaacagtggacgctggataccctcactctgcccagcaagcaggatctggccaaggacaaagtcgcccccatggcgatgaatgaccccatgggcatcgtcagttccttcatggatgccgtcgccaaggcggatttccgcggggcgaggaagttcgtggacggaactaaagtgcaggatgccacggtagccggtttgtgcattctgtttgaggagggggctttccggctccgggaggacgctcccatcaaaaccgcctacgaagcgcccaccaatgcggggtttttcgttcatcttcaggacgcccagggcaggaaggccggcaatgtaggcctgaccgtggccaaaacggacggacaatggctggttgcggaagcttccctggacagcatgctggaagcctatacgaaacggcagggggccggagacgacatctttatccccattgtaaaaaatccccagggcggcgattccctggccctgttcttcggctttaatgaagataccctttccaagcgttccgaacgccagctgcaaatcgtagcggaagctatcaagatggacagtggcaagaagctggaaatcagcggccatacggatgacgtggggagcgaacgctacaaccaggggctctccgaacgccgtgcggccgccgtgaaagcccagctcgtccagttcggcgttcctgcggaaagaatcgttaccaagggattcggcaaatctcagccgcgccgaacctactcccccacggcagacgaagaaacaaggaatgaagcccgcaaggaaaaccgccgcgcggaaatgtacctggacttttaaaagagtaatcagagagcagagaaggggcaagcctttccaacttctctattcactgttgcctgtcaattattaaccatattccatggctcgccgatacgccatcaggcaggatgccgcgccggtcgcccccatctccgggatcgactaccgtacggccctcaatgaagaacagtacgccgccgtttcttcagaaccggggccggctcttgtcatcgcaggagccggatcgggaaaaacgcgcacgctgacttatcgcgtggcctggcttctggatcacggtacggacccatggaacattctgctgcttaccttcaccaataaggcggcgcgggaaatgacggaacgggtgcgttccctgattcccctggacttgtcccgcctgtggagcggcacgttccattccattgccaaccgcatcctgcgccagcatgcggaatacctgggatatacgccggcttttacaatcatggactctgacgaccgcaaatccatgattaaaagcgtggtcaaatccctcaaactggatgagaaatccacccgcttccccaagccggaagttctttcctccctgttcagtctggcagacaacgagggagccaatatccgggaaacgcaggaaaacgcctatccctacctttccaaccacctggacgccatcctggaggtgcatgaccaatacgtagcccgcaagcaggaaaccaacagcatggactttgacgacctgcttctcaacgtcgtgaggctttttcaggaacaggagcacctgcgagccctgtacggttcccgcttccagcatatcctggtggatgagtaccaggacaccaattacctccagagccgcctcatcgacatgctggcccgggaacacggccagctgatggtggtgggggacgatgcccagagcatctactcctggcgcggagcggacatggaaaacatcctcagcttcactacccgctatccggcggcaaagactttcaagatagaaaccaattaccgcagtgtgccggaaattctggaactttccaacgcggctatcgccgccaacgaagttcaaattgaaaaacagctccgctccgtgcggcccaccggggaaatgccccccgccctcgtcccgctcaacgacgaccggatgcaggccaaatttgtcgtccagcgtatcagggatctcattgaagaaggcacggaccccagtgaaatagccgtgctttaccgcgcccacttccacagcatggaattgcaaatggaactgacccgcggagaaatacctttccgcatcaccagcggcatcaggtttttcgagcaggcccatattaaggacgtggtggcatttatgcgttttgtggtcaatcccagggatgaactttccttccgccgcatggtgatgctgctgcccggcatcggccccggcatggcccaaaaactctggatacgctggaccgcctgcccggaaagccggcaagaaacccctccggaatccttttccgccctgatgctggatttcccggttcctgccaaatccagaacggcctggacgcagctttgctacacactggatgaactggcccctgccggaaagctggccggaccggcctccatgctcctttccatcaatgaggccgtgtacgacgagtacatgcaggccgcattcgaaaattacgaccagcgcaggcaggaccttctgcatctggccggattttccgaacgctttgaatccacggaggattttctttcccagctttcccttttgggcaacacggatgatgaaagcgccgcggcggacttctccggtggctccgtcaccctgtccactatccaccaggccaagggactggaatggtctgtcgtcttcctgatcggcctgtgcgacggcatgtttccgcaccagagggtcattgatgacggagacctggccgggctggaagaagaacgccgcctcttttatgtaggcattacccgcgccaaggaccagctttacctgacctacccccgctggaactgccgcgcccagggaggaaccttcatgcaaatgccctcccgctttctggatgaattcccagccggcctggtggaagagtgggaggtggaataatccagatctcctctcccgggtcatatccgggaaacgccggttctcaatattctcccgccggacagggaaaacgtggcgcggagtttccgaagggttcttttcccacccgtttgaattcctgcttccaacccttatccggagatatttccgtctttcccggagaacggaattccccgacaaccccggccatattccaaaaaccgtggacaccgcggctcttaccgcatccttccgtttctaccgctgcggttcatcaccgccatatccagcaaagccaatacccacttccgtattttgcttctcaaaacgcttgttgggaagcatcccaaaccctcttttcattcctgctggtttgcaaaattaaatatatagctttctgattttggcgggaaagcgcttagggaaatatttcatatgcgtttttgtaagtaagtatttacggaatatactgaaatccccacttcgtcatttcatagaatacaggcaacaatgcctgccccttttccgtaagagagtattcaacacggggcggtatctcgttgaattgcattctggatacaagcccgtccttttctaattctcgaagggaagaggcaagcatggtatttgtaataccattaatatttttttttaactcaccaaagcggatgggatcttgaataaacaattcataaaggatttgaaatttccatttcccctgcaacataagcagaagtggagtcacaggacaattccccgcttcagtcaaaattccctctttcacttcatgcctgtattcatcgtaggttatatccttgtgcatgaaaaatgccttcctttctctattagtatagtcaaccgtactgagtcagaataatatgcgtacttgaaaaaaattttatccttagtataattatcttactaatagaagtcaacaagtaaagttaaatatttataatcgttttacaatgaaagaaatcaatataggtcaggcgacggctatcacctctcccaatcctctcgtgttggtttgcaccaaaaaagagaacggtatgctgaacatggctcccgtttcattcttcatgtactcctcgtttaaccctcctatgctggcctttgcaatgggtaaaaccgccaattccggcgaaaatatccgcaagaccggcaaagccgtactcgctgcccctggcgtcagcttgaaagatgcggtcatggcttacggctctaaaaacggcgggcagattgacaaactgaaggaatttccagtcgctctgcaaaacattgacggaacagacattcagatcccggaggacagccctattgcttttgtggcatcgctagctgaaactgtggagtctggcgatcattacctgtatctctgcaatattgacaaaatagtggcggacaaaacaaaagaagccctgttcgcatggaatggttatgccaaagttgccccggcacaggaaaaataatttgatgccgtcagcggggttttcatggttttctgtgaaagccctgttcttttccaaatatcaaaatctggcgatggggatgatataataaagtgtataattaaaaaaaagcgacacttatgagccagttttctaattttcaaagtagaccggatcacattgaaatccgtggcgcccgtgttcataatctgaaaaatattgatttagatatcccgttgggcaagctggtaggaattacgggggtgtcaggatcaggaaagtcctctttggctttgggcgtactttatgccgaaggttcccgccgctatttagaggcattgtccgcctatactcggcggcgtataatacagatggcagaggcaaaaattgacagtatagaatatgtcccagctgcccttgctcttcgtcaacgtcccgctgttcccggtgtccgcagtacatttggaacggctaccgaacttttgaactcaatccggcttatgttttcccgcttgggaaatcaccgctgtcccaatggacatttgctttcgccatcggtcaacgtcgcggcaatgcctccccttgtctgctctgtatgcggagcggtatttgacggtctcagcgcagaaagtttttcattcaatggccaaggagcgtgtcacacctgcggaggaactggaattgttcaagcagtagacgaaacaactttagtgcctgacgagtccctttccattgacgaaggagcagttgcgccgtggaattctttgatgtggtcgctgatgactaacgtatgccgggcgatgggcgttcgaaccgatgtacctttttcggagttgacagaacaggaacgggagatcgtctttcatggtccgccagaaaagaaacatatcctttataaagcaaagagcagcaaccaagcgggagaaatggattttacctattataacgctgtttataccgtggaaaatgcccttgctaaagttaaagacgaaaagggaatgaagcgggtagaaaaatttttgaagcggaacacctgcccgaattgcggaggctcccggctcaataagcgggcgttatcaagtctgctatgcggaaaaaaccttgcggaaatcaccaaaatgacattaagcgatttaaccgcttggataaagacgatttctgcttccatgccggaagaactaaaaacaatggcggaaagtatctgcggtcaatttctgcatgtatcaaaacgtctttctgacttaggtctggattatattacccttgaccgggccggaacaacgctttccaccggagagcgtcaacgcgtgcagcttgcaagggctgtacgaaaccgtaccacaggtgttctctatgtgttggatgaaccgtctattggcttacacccagcaaatgtagatgggctgttgggcgttatagatgatcttattgcccatggtaattctgtgatattggtagaccatgatgtgcgagttttaaaggctgctgattggttaattgaaatgggcccaaaagctggagagcatggcggacagatagttgcacagggaacgattaaagcagtagcaaaaaaaacgagttcactcatcgctggatttttggcagacaaggaaaaaccggttatccgagaaacggcaacgccggaggccatgtttgcacatgggcatatcaaactgtctactgctcctttgcatacagtccatgcccttgatttagacatccccaaaggtcggctgattgctgtaacaggagtttccggttccggcaaaacaacactgattttggaaagtcttattcccgccatagaagctgccatagcgaaagcgccgatgcctgaccatgtgaaaagcgtggaggtagccggtattgaacgtataaatcttattgatgcaacacctattggcgtgaatggccgttctaccgttgcaacatacagcgggatattagatgatttgcgccggctttatgcagctatcccggaagcaaaatcaaaagggtataaagtaagtgacttttcctataatactgggtcactccgttgctttggttgtgacggaacaggtcaaattacaatggatgtgcaatttctcccggacgtggatatcatctgcccggactgcggcggctcccgctatgggaaagaagcggaggcaattcgttatcgctctaaaaaagacaaggtgaacgcacccggtatttctctgcctgtactgatggggatgaccgtggagcaggcgttagaacgcttatgtgacgtgaaaaaggttaaagaaaagctccaaattctttctgatttaggtttgggttatttaactttaggcgaagcaactcctgccctgtccggcggtgaggcacagcggctaaagctggcggctgaaatggaaaaggcacaggacgacgccatatttgtatttgacgagccaacgattggacttcatccgctggatgtacggatactaattggcgtatttcagaaacttgttgatgccggtgcaacagttatcgtcattgagcatgatttaaacatgattgccaattccgattatgtggtcgatatggggccgggaggcggcaaagcaggaggacaaattgtagcaactggtttgcctaaaaaaatcgctgaaacggctgaaagccttacaggaaaatatctatgtgaaataatttcatagaaacgtaaatctgtaggacgacggtaaaagaaaaagccgtcgtgcaacagcattttgatactcccaaattaaaaggagattatatatttgacttaggtgttttgtatttttatagatgaaaaagagaagttttatcaggaagaatatatatgactttttatattacagcgttctaaattatttctactcactcgaacacacttagatagactattatgtgttttttttcataatcttcatctgggtcaataagaataatttctttagcatatattataatggaatcttcatctagcttagatttaatattatgccttttaaatttgtgatttttccgtggcggatttttatctggcattttagattttaagtttattgttgacatgttatattgatttattttttgataaggtcttacagtcagtagtttttctaatttagaaaaaaagattaacttacttctacaacattctaaatacaactttatagctttaaattcaaaattacttaattttgtattcttttcattatcttttttaacaataaattgaagcaacccaaaaatgtttccatcaggacacaaaaggggaactccgatgtattgtaaatattttttatcatctttaggttgatgaataaaattcttttctatttcttttctattcttataggacacaacttctttgatgccgttcaaaaaaatttttcatagaaatatttagagactgtttctataggaatttctcttccataaattgaaggcgtatcagaattagattcatcttcctcccaatatatcatctttgtcgtattgtcatttaatctttgtgtataagaaatttcaaaagccaacttaggattataattctctatggtttttaatatcgtgctacatatagttttacacgcgagcttaaaactccaatgtaattcaagttttttagcgttttttaaattattgcttgcactgtaaaattcttgagaaaaatcttcacatgcagaagataatttatgattagaatcttcatgcatttttatcgttttattcaaaatttctactgtttgcgttttatctatttcaattatatataaaactatgtatataatagcaaggataattaatataaagtctttatcaatcgaaaatttattaaatatcggaagtaatttattaaaatcaattgttccaataaatgttattaatatgaacaaaacagcatttacagtctttagccatgtcaaaccactcattaaaaaatatgttttcctaaggcagaggtatcattaatctcttatggcgacaatcattttcatctaacatttttcctttctacctcgcttagtaatctgttcagtataaattttccattcagatagcaatttgtaatttaggtacacaatgtagccttcattcatcaaatgatacaaggaggctcgtacgttgaatgcatctaaaacgggacaactattctgaggaagtttccttttcttatttacaccctttatcttctaacgttcttttagctgttccttccaccgcccataccacaaattcctcaacgctcatatccttctgaatcgccgcccgaacggccaaattgagaattttgttagggataggaacgcttagttgagaaacaaaatcgttgttggaagcaggttcccggcctttcatgtaccgggaaatcagaatctggacgtgtttagggatgttgcctttggaaaaatagttatcaatggtgcttctggctagacctagggaggaagcaagttcggtgcgggaaactttgttctctcccaaccaccttcccaaagtctgaatatccagcgggcgtttctcgtccatatgggtaattttctcctatcaggagggcaaatggaagattccgggctgtttaggattgacaaaatcctattaggagaataatagctcttttatcggacaatattatatcttaacaggagaattctttgtcctaactaaggaatccaaaacctaaaaacatcatgaactcgaaaacaatcatagccagtttggggcttctgggcctctcatgtaccgcccaagccgcctctagtgacccttggaactattatagggtaggagggaattatagctccgcatattcaacacggtatgattccaattttggaatgagtatcaaaggtatgtatggattccactcaggaaatgattatggaatagacatgccagacctgtacggtgcccaattaggacttcacgcaaatattccatcgggttctgttttccatgaactatctttcaatctcggcgcgcttacaggctctaaaacctacggcggcgtgctgaagtggaagcaagaagtatttccctttactgctggatattcctttaatgtccccttatctgattcagccactttctatttaggcggcaagattggccttcactattataaacaggaagtttccttaggcggggaaaaagcgtctgaatctgattcgagcggaacttactcggcattaatcggtttcaaatttgctgtcgcagaaaagacagatatcgttattggatatgaaataacgaaatactggtcagatgttgacccatatcattttatcacagttggttttagctggaccttctgacctccttcggcggtgaattaactggcctccttcctttcggggaagggggcgattctttgatttgcatgagtggccgtcaccttattctcagggtggcggtcaattcttcaattcagcgtaagtgattctcgtcgaaaatgctctagccataagagcatccaatctcacccacgtatggattttcacattcccttcattcaaccgataagcaaattcatctacatatctctgtaaatgttttgtgctgaatgaatggtagattccatagaatcctctcttcaaaaccgcccatacgctttcaatgccgttagtatgagccattccgtcaacatactgtttggcactatggtttaccacctgatgattgaactgtgactctttgtaggaagcatgttcatcagtaaccagaacagaatcccggctcaaatacttattgagaatctgatgaactgtatctcttgaagtatcgggaataacccttgccaaaacctttcccgctctggccctcattcctaaaaccgccgtctttcctacaattccgcgccccgctttcaatttctgcgattcgtgcttattggattccttgcctccaatatacaccccatcagcttcaacgattccagacagaaagccgttatcgtcatcatggttggaattgcaagcttctctaatcctttgaagcataaaccacgctgttttttgcgttaccccaatttctttagaaagttgcatggagctaataccctttctggaagtcactactaaatagaaggcaaaaatccatttatgaagtggaacatggcttctctcaaaaatagttccagtcctcacagtataaactttcccgcactccccgcattcaaaatacccctcaaccccattccttttcaccctatactgcttttcacttttcccgcaaaacgggcaaactaccttatcaccccaccgtttttcctctaaatacctttttgccgattcttcattggggaatatttcaaaaagctcaaaaagtgaaatagttaagcggtcgttcatgggtgcctccttagtatggctaattaatagcatacggagaaaccgaagtcaagtatataagacccaattaaaaaacggcggtctcgggattctcaaagccgccgttttttatcctctctctgaatgtctgaccttcacggttctgcgcatatcaaggctcttttcgtaaaattagtaattgacttctccatatccgcgaaaataactgttttcaagaatttttagagataatcaaaattgttgctataaaaaatgaattgacctggatattcttgaaattccttcccggctcaaaactgaaaaaacatgtcatgattaaattatttgaagaagaaatataaccaattcatcatgaataattttaattattattttcattaatttctctcatgtcattccggtgaacgaaccggaatgagaatcatctaaaatctcgggcgccgtgattgtcacgaacgcataaccatctaatcattaaacaaataaaaaagcatgaaattaagactcccacatatgctgctggcggctgttatcgcctgccttggcagtttctccgttgctacggcagctgactatgcagtcaacagtgccgatgaattcgttacggcctggaaccaggctgccgcttccaatgaagcttcaaccatcacgattaccgtaccttccggctccgataatattacgctgacccaagagcaacgagcccagttgaacgccatctccggaacgggcaacgtcaccattcaaatgacggacgccagcaacaaactggttaatttcaattacgatctggttaacaaccaagtcagtttcaacgacgtcaccttgagtgaacctctgggaagcgacaatgacattgtggtgacgaatgcttcaaataccacaactattgatggcaggaatattgccatcgaaggtacgaatgatgctgccaatcccaagacggtgggagccaccgtcacctccacgaacggacaggtaggcatcggcgacaatgtttccatggaaaaagccgttaccgtcaccggccaggcagctcaaaccgtagatccggcaacgccgccgaccggccaagcctataccaagacgacgtacaatacttacaataattccaacgaacaggccgtggtcctgggcaacaacgtcacgatgcaggataccgtaacggcgacaggccaaatcgtaagcgatccggcatccaaggttgcgctgaacggagatgtgacctccacagcgggaatcggaaccgtaactacggaacagtttgacgcctccaacgcccagaccggcaaaaccgtcatcgactctatggatgacagcgtctccggcggcatcattcttggagaaaccacagccggggccgtcaccctcaaaactgagggcggcaatatttccttgggagacaattccgtcctggatggcactactgtttccgcagaatccgccgacctgaacaaaaccgtttacagcaatgacggcggcagctggaataccgtcgcaagtacggaaaagctgggcaccatcgaaggcagcgtcacgctgggtgaaaatactaccgtcaagggaaattccaccctgacagcggatgacaatatcgccatcggcaacaacagcgtcatcaccggcaataccgccgctgacggcgtgatctccgcaggtggccagatttccatcggggacggtacccaggtcttggataacaccgccaccagcgacggcaaagccgccatcaacctggcggacgggcaaaccctgtacatcggctccggagcaatcctttccggcaatacttccaacggcgtttccggttccgtgcaggctggccaaaacacccagatcaacgtttatacggactccaccgcctataccttcatcaatgacggcatctccaccacggccgccgcttccacggctgacgccgctccgctggctgctgaccagaccgtcatgacgaagaccggagcgggaactctcgtttacggcggcacaggaaccaccgatacgttcggaggaacctaccagcagcttgaaggcaacctgatcatcggccatgccaccttcggcgccgttgactccgccaccggaaaagtcggtccgctccagtccattgacggcgccgtaatggggacggacgatactgtttacgacattcggacgggacaggtgaccctggcgaagaattccaccatgaagggagcttccgccactttcggaggcgattctaccttgctgctgagcgacgggtccgtactggacttcggcactcccgccacgttccaggataattcccgcgtaggcatccaggtatccgatgccagcggcaatcccgttccgctcgcccaactccgcaaggggacggaaagcgtgacggtcacgctgaacggcacggacatttccggacgcctgctgaacaacgtatttctgagcaccaccatggctccgggaacggcggaaggcaccaccaccatcacccaggatatgaagggcattgacggccccatgtccggctacaacggcaacgtttacaccgtagcggccgctctggaaaacaaccgtctgaatgtggccgccggttctcccgccgcccagttctatgaaaacctgttccgggccacgagcgcggatgaagcggcccgcatcatccagtccgtcagcggtgaacacgtggtgaacttcacctgggcagccagccgcaccgtgcggaacttcgccgacctggggcgcattcaatccgccgcctccatggcacgccagacggaagacaccgttgaagtagtggacgccaagggttctccgatcgcccgcaagacaatcgccagaggcaacggcaatatctgggtgggcggcatgggaatctgggatgaccaggatgcccgcgacggtgtttccgggtataagtataatgccggcggttatgccgtaggcattgactacaaagccgctcaaggttccctgatcggcatcgccgccggtcaaagcttcggcagcttcaaggataagacaggcatcggcgccgactacgacgtcgattccttcctggccatgatttatggacgcatgcatcccttcagggacagcaagttcactctggacggctacggcgcctacggacgttcccgtttcaaaggtgattcctacatcatggggtctgccgccaacggcagagcagatacggacaccttcagcggcgccctttacggcacctggacggaacgtttcgcactcggcagggcctttataacaccttacacgggtattgagttcatgacttccgaactcaagggattctctgaaagcggaccttatgggcgcaccttcggccacgcccgggcccagaactggaccattcctgtcggcattacgatcgcccgcgcctaccagacggacggaggcaccaccatcaccccggccttgacggtagccgtatcccaggatgtgagccgcatgaatccgaaatccaatgtcgccggccccctcggaacctggaacgcccgcggcgtcaatgttggccgcaccgcattccgtttgaatgccggcattgatgtgctcttctccaaccagtggggagcacgcgtctgctaccagttcgagacccgcaacaagctgaccgcccacggtatcaacggcgccctcagctatacgttctaagtaggagagcgctccagcgcatgcttttacttggttatggtaggccctttcccgccccacgcgggaaagggttttccgtatgtttccgcatccgttcttttaattcctctgcggattcccaatccgaagtcaacaaaaataaatccacgtctctttattatgcataaataattggaattgtgaattatataatggttttaaatttcccgcaggaaagtttctggttataagacgactctgttcatgtatttgtataaacatctcgtttttatcgtttagtgttgacttcggattgggaatccgttacccgtgcttttttgaagtacctgatcaacatgaaattatctacattctgcatcttatgttgcctttccgcaggtctttcccaggctgccacctacgtctggagcggagcggcagggaacggaatttacggagattccaacaactggacggtcaacggcgcgccgaacggctattatccgcaaagcaatagtgataccgccatcatcggagaaaatgccggaacgatcacctggtccaccgggcaatcttatttcggagccactaacacagtccaaatagactccggaagcaccctgctttgtacaacggaaataggagatctcaacgttaattctttcacgctgaaaggcaattcccaattgatatttgaatccagcaacgcccttggactgggacgtgatttcacgctgaacttcggcacgtttacggcggaggaacacggttcctgggttgccacgaatctccctagcttctggaccaatgggaaaaccgtcaccttcgtcggcacactggatatgaacaacctttccggaagcggaactattgaactcgcttccattaaatcttcccaactgggaggcaatctcaatttggacctgagcggcctggacattaccggcaacaaccaaattcaagcggatgtaacacaggtcacggaaaacgacatcatcaaggtgttgattaactacgaaaccgttccggaacccacaacggccacgctgagcctcctgggactgggcggtctgctgttaagaagaaagagacagtagcctcttccgcatgtctgattctaccccggcttattcctcaaggaaagccggggttttcttttgccgctggcccggtttgcgcacgcctcccttatatcgcaacatttatcctgcggaaccatatagcatccttccagacggaaaaatccgttttccagagcaggtcagaactcgcaattccgcggggtacgggcaaaaggcaggacgtcgcggatgttggtcaccccggtcacgaacatcaacaggcgttcaaacccggccccgaatccggcgtgcggcaccgtgccgtagcggcgcagatccgcataccaccggtacgcttccgcattcatgcccatgctgcgcatgttttcctccagaatatccagccgctcctcacgctggctgccacccacgatctcaccaatgccgggcaccagcacatccatggcggtaacggtctttccgtcttcattcaggcgcatatagaagggtttaatctccttcgggtagttgtacacgatgacggggcatttaaaatgctcctccgtcaggaagcgttcatgttcgctctgcagattgatgccccaggaaacggggtaatcaaatgttttgccgctcttgagcaggatatccacggcttccgtataggaacagcgcacaaacggcgtttccttcacatgctccaggcgttcccgcagccccttgtctacaaaacgggtcaggaattccacttcttccgcgctgtttgccaaggcatcgccgacgagaaaacggacaaactcttccgccatgtccatgtctccatacaggtcgcagaatgccatttcaggctccaccatccagaattccgccgcatggcgcgtagtattggagttctccgcccggaacgtggggccaaaggtataaatgttgctcagggcgcacgcgaacgcttccccttccagctggccgcttaccgtgaggtaggccgccttgccgaagaaatcccgggaggcgtcacgggaagcagcgtctcccacatccaaagtcgtcacgcggaacatttctccggccccttcgcagtcactggcggtaataatgggagtgctgacccaggaaaaatccctttcctggaaaaagcggtggatggcgaaggccagcctgctgcgcatgcggaacacggctccaaacaggttggtgcgggggcgcaaatgggcgatggaacgcagaaactccggcgtatgcccctttttctgcaagggataggaatccggaacagcccccaccagctccagggaagcggcgcgcaattcccatcgctgccttccctgcccggcaaccagagcgccgcggatgctcacggcagaccccgtagccatttctccaatccgttcatagccggggataccctcatccgccacgacctgcagggaggcgacggaggaaccgtcattcacctccagaaaggaaaaagccttggaatcacggcgcgtacgcacccatccctgaatcagtacgtccggcatttcctcctcactgtccaggacatgtttcaccaatgttctgttcatcatggcgcaagtataatacagcgccttgcccatgccagcagaattgcttcaccacggagagaatattacggattttccggcagagaaggaggggatatgccgcacctgttatttggaaggctgcatgacctgccgccccgtcgtaatggcgatggcatccgccagcggcatttccttctccgtatgggcggccccccaggaatctgaaaagataagcgttttcttttcctcgtcaaaaccgataatcagcctcaaatggcctccgcgcgtctgggacaaacgcaacggttccggaacaatgccaagctgcacggaccaaaacacggggatgcccgccatgatatagggcctgatggcattgagccacctgtccacctgggacggtgatccggcacgcgccagcttcaggacttctccgtccgcattgtcccagaaaccggaccagtcatgttcattttccaccttctcttttttcagcttggaggcggcgcggttataggctttcagcagattcctgaaatcacgggaattcgccagggaatccagcactttgatccgtatctggaagcgcgtcccgatttttttcaggttttccgccattgccgccgtattagtgcctccgtccgcagaggtattggccagggaagccagttcatgctgatccacatagtccattccataataggcaaaaatgcgggcggcggtagccaccacgcaataacctttctggccctggtccaccatgggaatatcctgaatcaccacccgctttccttctttcctgacgtgctgcttgatatccgcctttctggcccgggaagaagcatctcccctcgcgatggaatcttccgtgggaccggccttcatccggataaattccgcttcaaactccctgccctcccgcgatgtattgatctccagggtaatcgccccgttgtcccaaatccaggaccagccgttgactttgactaccgcctccttacgggaggcccggtactccttgggctgaatcccggtaagagcggtcagggattccttgatgagctccaggcgcttgtcaaattcatccttgccaatggccccgttatcccccttgttgtacatcatgacagtcattgactggggggctccgtccttccagttcaccagcatttcccccagggacatgtcccctatcttgatggagggcttcgcaatccggagctgggtcttgcctttatccacccagccgccgggctctccgttaaaatactttccgaacaaatccggctgaggcagcttccagaacgcaccagactttaaatccggcgccatgttgcccgcgccccaagcggagggaagaaggcagcagactgaaaggaaaggcagaatggcagagataaatcgcataacgaaaaaaggggcggggaatagccccgctgctcggaatctacgctggtaatgtattctcccatgacggttctgccaagaaaaaatgaatcttcctccagcgaaccattccttctttatcctctcccatccgtccttttctaataatgctgcccggtaaaaaaaccggcctgccgcagtaaatccgcagcaggccggtttgaatgaataaaccagtccgatgatttacatgaacggacgcaaacgctgcatgatagcgtccttggaagaagctcccaccatcgtatccatgatttccccgtccttgataatcagaagagtggggatagtgcgcacgccataggtggcggccagtccgttgttggcgtccacatccactttgcccactttgatcttaccggccaattccgtagaaagctggtcaataatcggggcgatcatgcggcagggcccgcaccatgtagcccagaaatcgacaagcacaggaatgtcggacttcagaacttcatcctcaaaatttgcttcagaaaatacgtttgccatagtaccgcttagagtatttcaacaatcattacgttcacttattcttccgcatcggcgccatcatcggaagactcttcggcagaaacgtcatcggccgtttcttcatcggcggcgggagcagcgggggcaggcttggagtctccgcccagccagccaaccatgctgcgggcttccaaggtgtccgtagcgtattgataaccgatgaaaacaagcgcaaaggcaagggccacaaaggagagaacattcaacagcgtactgggagccgcatccgtatcttcttgaaacttcctggccgtaaaggaggcggaagaaaccggagaggccgcgggtgcggtattcagcccgatggtggcctgcggaagctgtgctgtcgccatgcctgctccgggaggagtcagaggaacagtaggagcggcagcggcaggcgccgcgccagcaggaggaaccacgggggccacaggcgtagtggcggagccgagggcaaccgtctttaatcctccgccaagcttgatgcctccgccaagaccggcgggacgaaggggaatagtgggcgcagcggcggcaggcggagcagcaggtgccgcaggcgcggcggctaccggaggaacggccggagcggcaggtgccttgggcacggaaggagcagccggcggagtcggaatgctgggcggaggcggagtaccgcccggaatggaggggggaggtggattactcatatcggaaaaataactgtgctgaacgatagctctcgcttatttcagcccgtaaatcaagaaaaagaatgcgtagaacctgaattccgtgcaattttttttaatttgaagcgtattccatctcaaacacgctgtccggacttgccctgaaaagcgttctttcctacgctgtgtatccggcattatctcatatgaaacccattaccaaactagcttcctccaccctgcccgacggctccgttctcgacctatgggaacgggacggtttccactttcttttgcgcgacggcgtacagacagcgtccagcttttcccacggaagcaatgaagcggcggcagccatggcggcggctccggttaaaagagccaaccagccctccttccttctcgacggcctcggcctgggattcaccctgttcgccctgatggatcaaattcgcagggaaaaggcccgcttcatcgtggcggaaccctgcaaaccgcttatcgactggcacaaggaactgatgaaccaggaacggcccggattcctgcacgatccccgcgtcagcgtggaatttaccccggcgcttcaaatcgcccgcaagaatccgaaaagcttccacgccattctgtcccattccacgcacgaacgcatgaacctgagcgtagccgaagcttccgactattttgccgcactcaagcagggcggtctgctggtcattacggtagcccgcccggacacccgactttcccggacactgcaaaaagcggggttcgaagtaagcacggaagccgttccggcctcacataaaggaaagaaaaccgcttttcacaccgttattcttggaaagaagggacgtttcgtccccttctccgctcaccagtcctgatcccatcctattattatgaactgcacatcccttaccatggccggacttctggccgccctgtccctgggaattccctccctggcggattccattgccccgggcattcttcttcccaaaaaaaataccaaatccatttccttctcccccaaggggacctcggacattttcctgctcggcatcatgccgcagggaagttccgtcaagaaaggggaatccgtagctcaggcggacttccgcatactggacaatagtatcgaagattatgaacgcgccatcaagagcaagaacctggaggtgctgaaactccggtacgccctggaccagcagaaggaacgttccgccctggccctgcaaaaatatcagacggccctgacacggacggaagaggatcaaaaggattttctggaaaagcggaaggcccgcatgctggcggaagaagaggaacgcgtcaacaaagccctgcgccacatgtcctacaaacaggaagagctgaaccagcttaccaagatgtacaaggatgaccaggtggcggaagaaacggaagagatcattttgaaacgcctgaaaaatgaacttggggaaagcgaatttgccgttcagggagccaaactcgttgcggaactggccaagctgcgcaatattcatcgcctgggggaagactatgctacggcagtcaaggaaaagcagatggatctggaacaggcaaggaagcaggcggattttgatctggaacagaaaaagatagccctgacggaggcggaagtctccctgagacgccttcagaataagtacaatgaactgaaagcagaccgggaaatggcctctttcaaggccccggaaaacggcatcctgctgtacggcggatatgtggcggaaaagtgggtggccattccggtggcggaaaagctgaaacccggcggcaaactgggagcttttgacaaaatcgccaccatcgttccaccagactcggaactgattgtccaggctactcttccggactccaccgctacgcccaaggtgggggaaaccgtcgtcatcaaaataacgaacatgcagattcccggcgttattacggaagccagccccattccgggagcagacggcaagcgccgcattatcatcacgcccaaggttcccgccagccagattttcgcccccggccttcccgtccaggtgaccatcaaggaccaacaggcctgatttcccttaacggatccccatgaataaagccgtccttttccttgccgcccttggagccagtacggcgctctgcgctcctgttccggcggaaaaagcggaaaaaagggataccattcccattgccagggttccggatgttccgcctccctcccgggaaacgctggacgcttctatccggaaggcggctgactttctgttgaaagaacagaacagggacggttcctggggaaaccatacgcgcaccaagggtctgaatgttctctgcccttatccggaaggccccagatcattcaggacagcctccacctctttgtgcgtgatcggcctcctgaccagccccctgaaagaagaccccgccgtcaaggcatccctggacaaggcgctgcagtacctgctaaccacgctgcccaccctgaaacggggagacacccgtaccgtgcttggcgtatggggccatgcctacggcctctccgccctgagccgggcggcgcggaaccttcctgcggatgcccctttgcgcgaagaactcaaaaaggtggcctccctccaagtcaaagcgctggaccagatggcggacgtccaaggcggctggggctattacacatttgaaactttttccaagcgtcccattggggaacccacttccttcctgacggctacagtccttcttgcctacaaggacgcggaacaggccttcggcctcaaagcggaaccccgcgtcgtcaaacgcgccgtcgcctgcctggaaaaactgaggacgcccgccggcagctacgtctattccctttcccattccttttatcccggcaggcccatcaaccgccacaccggcagcctggcccgcactcccgccggggatctggctctgatgcggtatgacccgtcctttatttccaggagtcagctggaagacggcctggaacgcatctggagccgcggcggctggctttcgctggctgtaaagaagcccattccccatgaaagctttgcccagaacgcgggctattttttctattacgggtattattacgccgcccgctgcctggaggaagtgacgccggaacacctggcgcgccatgcggcccatctggcaagcgacctcctgcccatgcaggaagaagacgggtcctggtgggattaccccctgtacaattaccacaaattctacggcaccggatatgccttatatgccgtctcccgcgtcagagaatccctgtatccctctgatgcggcaacaacttcatgacccatgttccgcccgctgacgaccatttttctcgccaccttgtgcctgcatcttcccgcagcgcagggggaatccgtgccagaggaaaaaacggatgttattccaatcgccaaaatcccggatatttcccctgcaaaacccggacaatttgacagggcattccgccgcggcgtggatttcctgctgaaaacgcaaaataaggacggctcctggggcgaccaccaggtaatcggcacctggaacatcctctgcccctacccggacgggcccctcaccttcaaaacagccagtaccgccctgtgcattgcagggctcaacgccagccccctgcatcatgaacccgccgtgcaggaagccatgacccgtgctgaagactatctaatccgtacgatgcaccatctgaaacgcggcgacgctctgtgcgtttacaacacctgggcgcatacttacgtgctggatgccatgagcatgagggctgcaagactggccccggacagccttcgctacagggaactgaaggaatgcgcccgctcccaggtaaaaaaacttaatgaactggcttccgccatggggggctggggctacctcacttattccggcttcagcaaacgccctgcggcacagcccacctctttcctgacgggaaccgtccttatctccgcctggatggcaggaaaatcattcggcctttcccttgatgataaaatattcacccgcgcgctgaaattcctcaaatcccagaggacgcctgcgggaacctatgtttattccctttcccattccttctatcccggcaggcccatcaaccgccataccggcagcctggcccggactcccgcctgtgattacgccatcaggctctgggaaccggaggacatctccctgcgccagcttgtggacggcctggaccgcctgtggagccgcaggggatggctgacgatggccctgcataaaccaactccccacgagagtttcgcccagaattccggctattttttctattacggatactattattcaggaatgtgcctggacatgctggcgccaaaccaggtaaagcgtcatgcatccctgttggcggacgatattctcacccgccagggaacagacggggcctggtgggactaccccctgtataattaccacaaattctacggcaccggatatgccctgtacgctctttcccgcgcctgggacaagctgtacggccaaccggaaccttctccatcctctatttccacactatcccggccatgataaataccatgaaatcgcttttggcgctctgcctgttttacagtgcggcttccgtctccaccgcagaaaccccaattaaacatacttccttcagacccggagaaatctggacggacaacaacggcgcgcacatcaacgcccacggcggcggcatcctgtacgacaagggaacctattactggtacggagaacacaaggtggagggggacgcgggaaactatgcccaggtgggggttcactgctattcctccaaagacctctataactggaaggacgaaggaatcgccctgaaggtggtggagggggaccattcccactccatcgccaggggctgcatcctggaacgccccaaagtggtttacaacaaaaagaccggaaagtacgtgatgtggttccacctggaactcaaggggaaaggatatggatccgcttacgcgggggtggcaacggcagcaaaacccacagggccattcaagttcctgaaagccgggcgagtcaacccgggcaaatggcccctgaacatggataaaaaggatcagacgaccgaattcaccaaggaaatgcccgactacgtccgcatcatccgcagggactatcccggcgggcagatgagccgggacatgaccatttttgtggacgacaatggaaaagcctaccacatctattcctcggaaggcaatatcacccttcacatcgcggagctgacgccggattacacggggcatacgggaaaatatgtccgggcgttcatcaaccgctacatggaagctcctgctatttgcaaaaacaagggcaaatactatcttatcgcttccggatgcacgggctgggctcccaacgccgcccgcagcgccgtggccaaaaacatcgccggcccatggatggaattgaaaaatccctgcgtggggcccaaggcaggcatcacgttcggcggccagagcactttcatcctgcctgtacagggcaaacccggaaaattcatcttcatggcggacatctggcggcccaaaaacgccattgacggccgttacctgtggctgcccatgaaatgggagggtgaccagattatcttggaatggaaggatgaatggacgctggatgacctgtaaatttatctccttcctttttatgcaggatacggtttattgcttccatctccttgccggaaggcagaagcggagccttctgtatgccttgtgctccgctctccttgttgcagcagtctggctgcttcatccggaatggcctttctgggcgggctacattgcctgggcactcgcttacgcggcaacgctgattgttcaacacaccattcccctttccatccgctgcccgcactgcggaaacgccgggctttattctgctccgcaaactccggaagaacaaagaaggccggatacaggcatcatgctggaatgccggggttgcggttccaccttttacacggacgcctatttgccctggccgggaaaaattatccgccggcgccccacttgcccggaagaatgggaagaaaaatctgcccgtaaacaagccgggcccgcttcctccggagaggaacgcaggccggaaaggtctttcgtcaacggaggaaaaatctaacgggcttttttggaagccatcacgtaattcctcatgcgctggtctgcgggggtggtggggcgcacgctggtaacccaattgccgtccttatccttctttttgatttccgttctgtcgcggtacaatttcgcggagaaatcgctggaatcaagaacaaccggccccggacctgtcgtgacaatgggagtgggaggaacctccgcaaccaccgtcattggagcggcaagggaattataccagtacaccagttcctgctggccgacaggatcgtccggataaggagcataagctccgttattggtggaaacctttacataggccggttccggaaatgtggtctgataggaagagggggaacaggcccccaacaacaaaaggccggctccgccggcaataatcatggaatgcagtttcatataggcattggactctcttccaccacctgccgttcagaggatgtacggttccggaatattacgggcacccgcgcgtcttgcgcttgagcgccattcccaacgccgtacgccatcatgcggaggaaaggagcttgccgtccccccggcggcatggttgaatattatttcctctccatgattacggatttccggctgaaagtgtttgaaaccgtcgcacggcgcctgaattttacgcgcgcggcggaagaactgttcatcacgcagccggccgtcacccggcatatcaaggaactggaacgtctgctggatgcccgtctgttcaaaagggagggacgagggattgccctgacggcggaaggcgtgcgcctgcttgcccattcccgccgcatcctcaaggaatacgaaacgctggctgaagaaatatcctttggccgcaattcccctgtttccggcgaattgatcctgggagccagctccaccatgtcccagtatgtgctgcctccgctgctggccctgttcaaccgccattacccggaaatacgcatatggctgaaaagcggcaatacggaggaaatagaacaggccgtccaagatgaatccgtgcagcttggcatcgtggaaggcacggcaacgcgcgcggacctgcattaccagccatttatggaggacgaaattattctggcaggaggcatgcaggccgccgtgcccagtgaagggctttccctcccgcaactctcccatgtgcccctgatcatgcgtgaaccggggtccggcacgcgccgggtggtggaggaagcgctgaaaaaacacgggatctccgtttccggcctccatattctgatgacgctgggcaatacggaaagcatcaagatgtatctggagcattctccggcgtgctctttcctctcctcccttgccgtccggggagaattcaaacgcggaagtttgaagaaaatacatctccgccacctggaaatccgccgcaccttccacttcgtcgcaggacatggagaccacagcagaatcaatgaactgttcatcaagttttgccgatattattataacaaaatttaattggctataataatttttaattagattttataatggttgcatcgtatatcattccgcagccaatccggtacgctcccggccagatacaacgggcagccgcaaccatcatttaccgaccatgtctcccaaacatctagccaatcccctccacggcatcctgcttattgttctgttttccttttccgctttttacattgctgattttgaatgggtgaaacatctttccctcagcccgctgatcgtcggcatcgtgctgggaatgctttacgccaacagcctgcgcaaccaccttccggaaacatgggttcccggcattcagttctgcaccaagcaggttttgagaacaggcattgtcctgtacggattcaaactgacttttcaaagtgtcatcgacatcggcggctccgccctggcgctcgaccttattgtggtcactctcaccattcttctgggagccgggctggggcgcctgctgaaaatggacagggacacggccctgctgacctccatcggcagttccatttgcggggcagcagccgttctgggggcggaacccgtcgtcaaaagcaaaccttacaaagccgctgtggccgtttccaccgtggtcatcttcggcacgctctccatgtttctgtatccagccctgcaccgggccggaatactggatctgacgccggaacaaatggggctttttaccggagccacccttcatgaagtggcgcatgtggtgggcgccggcaacgccatggggcaagctatttccgatccggccattatcgtcaaaatgatccgggtaatgatgctggccccggtgctggtcgtcctgagcattgtcctggcccggagggatccctcttccggcgcaaacggggaaaaacggaaaattaccattccctggttcgccttcctgttccttgccgtcattggctttaattccctgcacctgctgcctgccggacttgtggacgccataaataccctggatacattcctgctgaccatggcgatgacggccctgggcgcggaatccagctttgagaagtttaagaaagccggagcgcggcctttcctgcttgcaggcttcctgtatatctggcttttcttcggaggttactggctggtcaagctgatcagcctctaaattccaaaaacattcctcctgcggaaagagggcaaggcctacgccctgcctttccgaacaggagaaaaaagccgtttcaccgtcagaacgtgagaaccgtttcagcacaggttcaccgcctcgttccatcctgatttcctgccagaaaatccggttgaaaaggatcaccggaggaaccatgccggcatgggatgacggaacatgcggagcgccgcatcctgcccgcattactctcaactggccacctgtgccgcccaatacagacatcctctctttgctttctccgctgctgcggcaggttttcccggtaaggctcaacaaaaattcatagtcaaaccgtttggagacgctatagtatgcgtacccagttcttaaaaacaaatggcaaccaaattattcattcccggacccactgaagtagcacctgaagtacttgccgccatgagcggcccaatgatgggacaccgatccaaagcggcctccgccctgcagcgccgcatttccaacaatctgcgccgcatcctgctgacagaacaggaaattctgctttccacttcctccggtacgggcctgatggaaggcgccgtgcgttcctgcaccgccaaacgcgccgccattttttccgtgggagccttcggcgacaaatggtacaagatcgctacgggcaacggcgtgccctccgatattttcaagagcgaactggggcagcccactaccccggaaatggtggacgccgccctctccaccggcaaatacgacaccatttgcatcacgcacaatgagacgtccaccggcatccagaacccggtggaggaaattgcggaagtgcttaaaaaatacccggatgtcgtgtggtgcatggacgccgtgagttccgccgccggctcccggattgaaacggacaagctgggcgtggacgtactggtgacctccacccagaaggcgcttgccctgccccccggcatggctgtctgcacgctatcccaaaaagcgtacgaacgcaccgcctccgttcccaaccgcggctgctactttgacctgcgttccatttacgacactattcagaagaaggactaccagtacacgaacactccctgtgtctccatcatgtacgccatggacctccagctccagcgcatcatgcaggaaggtgtggaaaaccgctttgcgcgtcatgaagccatggccgaattcgtgcgttcctgggcggatgaatatttcagcgtctttgccaaccgggatcacctttcccgcaccctgacggtgatcagcaacacgagggacattgacatcgccgccctgaacaactccctgattgaacgcggcatgcagctcggcaacggttacggggacttgaagaacaaaacgttccgcattgcccacatgggcgagctgacaatggatgacatgcgctccatcacgtccagcatcgtggatatcctgaagctcaaataagccaggcccctgccctcttttccggctccgtccggaaaagagggcggaacgcctccgccggaacatgaacggaacaatcgccgggaacaggatacatcgcggatatcccggaacttgttcatctttgatcttttccgcatcccggcggcattcgtcatcgtccaaactttcaatcaggcacggtctttccgggacaacccgttctttcaggactccatttcacgttatttgctgctgttcattgcggcatgcattttggccgggcttgtttccagcattcgtgcgctatatcatccttcccattactgactttccgaactcttccttccatgtccactctccatcccttccccgccctgcgccctcctcgggaactggccgcgcgggtctcctccctcccctatgatgtcatgaaccaccgggaagccgaggaaatggcctccggaaatgacgcctctttcctccatatctgccgttccgacatcgacacgagcgaagccgccatccatgccccggaaacctacgccaaggcccgggaaaacctggaaaggtttgtccgcgaaggttacctcttccgggatgaacggccgtctttctacatctaccgacaaatcatgtgggggcacgtacagacgggcatcgtcggctgcgcctccgtggatgaatatgccagcggcgccattaaaaaacacgaactgacccgcagggaaaaggaacttgaccggattgagcattttgacgcctgctccgctcagacggaaccggtattcctggcctaccgcaaacatgaaggtctttccaccatcatccgggaatggattaaattccacaaacccgaatatgattttaccacggaggacggcgtcacccatatcctgtggcccgtttccgagcccggcacggtggaagacatccgcaaaagctttgaggaagtggacgccctttacattgcggacgggcaccaccgcacggcttccagcgccgccgtttccgccaggcgccgccagaaacacccggactacacgggacaggaagaattcaactacctgatggctgtcgtcttttgtgatgaagaccttttcatcatggactacaaccgcgtcatacgcgacctgaacggcctgactgaagaggaattcatggaaaaactccgtacctcctttgacataaatcctgtggataccattcccggagaaggctacgccccccgcgccaagcatgagttcggcatgtatctgaatggacgctggtattccgccacggccaaaccgggaaccttcccggccggccatcccatcgaaagcctggactgcgccatcctccaggcgaatgtgctggctcccattctgggcattgacgatccacgcacgagcgatcgcatcgacttcgtaggaggaatccgcggtctgggagaactggaacgccgctgttccggggaaatggcgctggctttctccctgtatcccgtcaccatggccgaccttttccgcgtagcggacgccggagaaatcatgcctcccaaatccacctggtttgaacccaagctgcgcagcgggctttttatccataccattgaacaataatcttttccaccgtaccaacatgaacaaggtccttattcctaccaaactctccgacgtagcggccaacacgcttaaaacggccggctatgaagtcatccaggacgctgatacgcctctggaaaaacaggtagccgcccatccggatgccgtggctctgatcgtccgcagcgaaaaagtcactccggaaatcatggacgcccttccttccctgaagctggtcgtccgcgccggagccggttacgacaacattgacattgtgtacgcccgcaaaaaaaacgtggacgtcatgaatacccccggggccaactccaatgctgtggcggaagaagtcatggccatgattctggcctactaccgccacatcgtccaggcggacgccaccacccgggaaggcctgtgggaaaagaaaaaatacatgggcagcgagctgaccaaaaagacggtgggcatcatcggcctgggcaacatcggccgcaacctcgtcaagcgtctgcagggatttgaacccattctgctgggctacgatcactttctggcacgccagcgcgccctgaacatcggcgtcacccctaccagcattgaagatattttctcccagtgcgacattattaccctgcacgttccgggcggcccctccacccaccacatggtgaacgcggagctcattggaaaaatgaaagacggagcagtactcatcaactgctcccgctacggcgtggtggatgaagaagcgctggccgccgccaaggccgcaggcaaaaacatcggctacctgacggacgtacatcccaaggacgcgcccggagagaagccttccgcccccattgcggatttgattcttccccacctgggagccaacacccgggaggccaatacgaaagcggccaaacgcgccgcagaacagatgatcgcctacttttccgacggcgacacctcctgcgtggtgaacggggaatcccccagcggcctcaatccggcccatcttcaactggcgtttctgctcgcctccctggcgcgcaaggccggcggcaacaagcccatccgccgcgtggaatgcactttttacggcaacctgcgcattttccgcaaatggtttacggcccccattctggaaggccttctgccgcatgcggaaaaagggctcatgcctgccgccgcggaagaatccctgcgggagcacggcatcgttttcaaagcgagggaacccaaagacgacaaaccttatgaagattccatcacgctggacgtggccatggaagaggaagaggaatatttccacaccagcgtgcgcggcgtggtgacggaaggcatccccatggtctcccgcctgaacaatttcaacggattgtacgcggacctgcgcggcacgacattatgcctgcgctacaaggaccgcccgggtattatcgccctcatcggctccgccctgtcttccaatggaatcaacattgacaacatcgccgccccggccgaccacgccaccagggaggccctgaccgtgattaagaccaaccagccggtttccgatgaactgctggataaaatcgcgaaagagatagatgccatctctgcgttttccctgaatctttaacagggaaagacgcatttccggaaacctgcttttcagaccgcccgcttccttcatctccggagggaagcgggcggttcttatttctgccatgttgacaaggcttacccatttttatatcattgaccgaatcgtcggaacatatccatgcgctacgtactgcttctcctgaccttgttaaccgccggattttccgtctggtactatcaaaaccgcatttccccggaaggaaaggaactggccgcccaaaaaacaacattggaacaggaggccgcaatattggaaaaagccgttatccaatcccgaaagaagctggatgatgcccaggatgccacccgggcggcggaagaagacatagagagattccagcaagcttatctccaacaaaaaaggcaacagcatcaggaaatccaggattccgcctaccaaaaaagcgtggcggaccagcaggaagaagtgaaggaacacgaccaaaagattgaccggctgcgccgccgcatgaaaaggcaaagggaaagcaccaaatccgccagggaggaactgctccggaaaaaggagggaatgagaacccagcttgacaggctgaccgatcagcagaggagcattcaggcggaactggaacaggcggaacgcgaactggcccaaaaacgggaagaggccaaaagcaggaagaaattgtccgggattgcccctcagaagggaaatatttccgaacttcagacacagatgaaccttatccgccagaaaaccgcagctgctaaggaaaaaatgaaagccgtagatgcggcgctggaaactctggaagaaaagtctggcaaacaggaacgcctgatgcagaaggcggaggagaaactcaccgaacagaaaaacaaggttctggccgacgatgaccgggacgaatccgctgtcccggaaccgggcgatgaagacttgctggcggtggccgaatacagggagctgtccggagatgtacggaaaactctggaacaggcccgtaaaaaagaagaacaggcatcccgggcctatgacgaagcccgcgcggccatgcggaaagcttccagggaagaagtgaaaaagctggcaaagaaggaaaaagaccatgcctcctttcagaagctgttcacgggtgcagcctccgtcgcgggatttatcctgctcctgttcacgggtgcggccttccgcagcagcaacagttgaacatctgccggaaaatgaaatgcacggagaacaaggaagcacccgccttccctcagggagtcgttgacggacggcagggatatgatagtctcaggccagcctgatcatgctcacactggcccagattcacggacaaccggaaattttccattccattcagggggaaggagtctcccagggaacaccctgcgttttcctgcgtctggcaggctgcaatctggcctgttcctggtgtgatacggcgtattcctggaacggaacggttcccggaatgcgcctcgcgcctgaaaaggcggctgaactggtgctccattatccatgccgccgcctggtcctgaccggaggggagccgctcattcagcaaaaggcgcttcccgccctgctgcgcctgttgccggatcatgccgtggaaatggaaaccaacggcaccatcatgccggatacggaactgctgaaacgcgtcacgcaattcaacgtatctcccaaactcccccattcaggcaataacgacgttaagacttggaaaccggatatcctgcgctgtctggcgggtacggagaaagcctggttcaaattcgtcgtggcgtgcgaggacgatgtcagggccgttctgcggcgggcttccgaagcggacattcccccggaacgaattctgatcatgcccctggcctccacacgggatgagttgaacgccatgcgtgcgcaggcggtggaatggtgtctccgctacggtcttcgtttttcagaccgtctgcatatcgccatctggaacagcaaaaaaggcgtttaagcacgctcctgactcatcaggaaagacaaatgcttcccgcttttccggccgaaatcccgcaagcctccaaggctctgcgccatcggggaacctacgctttctgtttcaaatccagcagcatctgggtattgctggggtatttgttcaggaaaaacaggaaccgttccatggcttctacgggtttatgcccggctaaagcgcggcgaatcagattcatcttgtacagccatgcttccggcataatgagctcttccctccgcgtccccgatttcagaatgtccacggccgggaagatatattgctccgcaatgcggcggttcagcaccagttccatattgcccgtccccttgaattcctggaaaatcaggtcatccatgcggctgttggtttccaccagggcggtggcaatgatagtcagggaaccggcctggcgcgtattgcgggcggcggcaaaaaggcgccggggcatttccagagcgcgggcatcaatgccgccggacatcgtgcggccgcttcccttgtcagcgttattgtaggcgcgggccaggcgagtaatggaatccatcagcaggaaaacatgctgccccgcctctacaagccgtttggcgcgttcaatgcaaagttccgccatgcggcagtgatcgcgcacccttccatcattggaagaggcgtatacttcagctcccgggagggaacgtttaaactccgtcacttcttccggacgctcgtctaccagaagcaccatcaggtgaatggaatccctgtaattctccagaatggcttccgccatgtgctggagcagcgtcgtcttccctgcgcggggcggagagacaatcaggccgcgctggccgcgcccgattggagcaatcagatccaatgtgcgggtggtgtaacgctccggccgggtttcaaaagaaatgcgcttattaggattgaccgccttgagctcttcaaagtgcgggttcttgcgcgctttctctggagcaaccccgttaacggaggcaatttccgtcagaagaatgccgcggtcatgacggcaggcctgcccatgcacccacacggcaggacgcagaccgaacctgcggatcatatcctgcggcacataaacggcttccgcaaaagcgtcaaaatcattatccggcttccttaaaaagccgaaccccttattcgtaatttccagcaacccgtccaccggttccggcggcgccagttcacggggagcgctgttctgtggggttccgccctcctgattattattccagcggtttttaacccggtcattgccgtttctgccattgcggccatcctggcggttattccggtttttgttgaaacggtcgttgttattccggcggttctgcctgtcaaaacgctgcctttgcggctcatttgtccgacgcggctcccgggcggcatcttcggaaaaatccgccgcaccttcctgcaccaccttgatggacggaacggaagcatccgcctccggctcctgttccctcggtttcctcacaaatctctggcgaataaccttcggcctgccttctgcgggctgctccggaacagaatcggaagaatcggaagccggctcggcgggcgctgcatgaacggcaatttccgcctcagggccggctgaatcaccgttctccggagcaacagccttggcagcacgcctgcgcaccggcttgacggcggcttccgttccggagacaatcgtagagccgtcagtttccggaacctcctccacaggcttcttgcgcgggcgtccgcgccggggcctggcaggaacatcctgcgcttcttccaccgggatttcagcactgctcttacgggaagtcttcttccccggcatatcgacactttccatcccatcatccgccaattcagcaaccttcttccttatcgtccgcttgcggggagccggggaagaatcctgttccgtcccgggcacttccgcagcagtctggggctttaccggagcttccgccgcagacttggttttgcggataatacgttttttgggcgccggctccggagaaacctgttccggagtcaaatctgggggggtatcagacatggaaaagaaaattgaactgcaacaacaggcgtctcctgaaggacaacagcgttaaccaagctgctcaaggatttcttccgccacatcgaaattggagaagacgttcagcgcatcatcatagtcgtccagcgcttcatacaggcgcagggcggccttcgccgtttccagatcattaatcacggaagcattctgcgccacggaaatcagcttcatggaaattaccgtatgcccggcttcacgcagggcggcgcacacgttgttcaactccgttgggctcgtaacaaacacccattcattgtcggaatccccctgttccacatcatccgcgccgcattccagcgccagatccatggcggaatcctccgtaagaccttccgccatgatgcgggcctctcccttgcgttcaaactggtaagccacggaaccgggcgtaccgatgctgcctccgtttttggtgaacagggtacgcagctcggaagcggaacggtttgtgttgtccgtcgccacttcaatcaggaaagccgtgcctgaggggccgtagccttcataggtaatctcctggatggtagctcctcccagttccccggtgccttttttgatggcgcgttcaatattttccttgggggtggacacggccttggctccgtcaatggcggcgcgcaggcgcggattcagatcaggatctccgccgccgcttttggcggccagcatgatttcatgggcaaagcgggcaaaaaccttgcccttcttggcgtcttccttagccttaacgtacttgatcttagaccatttattatgtcctgacatagaattgggaataatagtaagtgtaggtgaaaagagacaaactaacaagtggaactgttctacaacccggggaacacattgtcatttgcaaataccacgcaggaagggaatcagggtgcggccatccgtaaatatattacaggtaccggatactctgccggggaacacgccgcgcaccttcaggagctccggctacctcttggcagtcactctcaacacacgcaaaataacgtattccccagcattggcaatacttttttaggtcacggcaaccggctgctttcagagttatcttctaccgccttcaattaatttttaatatattttgattatttaaaataataaatactgtttctttaatagtgaaaataaaaaaatatatccgcacagcaggctcctgttacacatccagccctgatggtgcagggggtgattccgtcatgggccaaagcctgagttctaacgccgcctctgttatcattgactaagaaagggaggcgggcttagatatgcccttctttctttttccctgtcttatggaacaagcagcgcaccaggaaaaatcacatgcggccctttcctccgtcctgtggtccgcctttttaacggtcatcaagctctgggccggcattgtaaccggcagcctcggcatcatttccgaagccctgcacagcgggctggacctgatggctgcggccatgactttttacgccgtaaaagtggcgtcccgccctgcggacgaaagccacccctacgggcacgaaaaggtggagaatctttccgccctggcggaaacagccctccttttagttacctgcgcctggattgtctgggaggctgtggaccgtctgttctacaatgaggcggagattaccctcacctggtgggcttttgccgtagtggccgtctccctgctggtagatgtgaaccgttccgccatgctccgccggatagccaaaaagcacaaaagccaggccctggaagcggatgcacttcactttaccacggatatctggtcttccgcagtcgtgctcctgggtcttttctgcatctggctggcccatctggtccctgcggaatcagcctggcacggcctcctggagagggcggatgccattgcggccctgtttgtggcggctctggtttgttccgtggctttcggccttgccaaacgttccatccacgccctgatggacggcggttcttcctccctgacgcggcaggtgctggacgccatgaaaaagaatgccccggattatccggtcaaacgcatccgcctgcgtgacggaggctcgcgcatctttgtagagctggatgtggaagcgcctgcggaactgcacgtggatgacgcccatgatgtggcggaatccattgaaggcattgtaaagcatgaattgtcggaagcggacgtcatcgtccatatcgaaccggcgcgggagaatctttccaatatggagccggacatgattatccaccggctggccttgcgccaccatgtccgcattcacggtttttatgcaggccacggcaaacaggccccctgttatttcatggatgtggaaattccggcggattggcccttggaacgcggctaccatgtggtggaggctttcagggattccattctgcatgaactcaagccggaaaaggtaatttgccgcattgaaccggattgccgcgacatggaaacaggcgccattgcggaacaggtttctccggaggaagtgcgcctgaaggtaaatctcattctccagcagcacagaaacatccgcaagatcctcaagctggacctgaccagggaggccaatttcccaaccttgacctgtgtgtgttccgtggacgcctccctgactatccgggaatgccaccagatcgcctcgcagctggaaaaccagatagaaaacgcactgcaccacctagggcgcgttaccgtcattcttaaaccgtccaagcagaacagaaattgaatgactgttgccggattcccgtaaaaacatgttccgaatccgggaaggagaaacggtttccattccgggcatgggaacctccgcccggacaaagcggagccaacgattatgaatggcccgcaacggaaactccgggcatttccctgtccagctccgcgcgaatgcgctggcgctcggaaacgatctgttcgtcgtccgcaccgccttcccgcaggaaatattccgccatggacagggctacttccgattccgaggaaaaaacctgggaagcgccggcttccttcagtatatccacgtccctcatgtacttggtgtgaatcatcacgtcaatatgagggttaagctccagagccacgcctactatctccttggcgtccggaatggaagcggagagaatcaggctttccgcatattcaatgcccgcatggcgcagaatttcccgctggctggcatccccgtaaacaatatcccctccctgctcccgtatagcggtaaccgtgtctatgttcatttccacgatgatgacttccaccccgttgtcattcaatatcctcttaagaatgcgccccgtggggccaaaccctaccaataccacgcgccgcgcatccggagcgggcaaggccatgctgttcacgccccccgggtccgcaagccctatgccgcgtttttgcagccatttgactgcaggtccaatctgccgatacaggatgggatttaaggaaatggagacgacagccgccagaatgatggcctgattggcatccggaggcaggatgttgtacatgagacctattccggcgagaatgaaagaaaattcacccacttgagccaaggccacggatacgctcagcgccagcggcaccggccgcctcaggcaacgaacaaccacataagccgccagcggcttgccgatcatcaccacccccagcgttgccagggccagaggccagcaatcccccacggacatcgggtcaaacatcatccccacggaaacgaagaagagaaccgcaaaagcatccctcatcaacatggcttccgccgccgcgcgcgcgcagaagtccgactggcctacaaccatccccgccaaaaacgcccccaaaaccatggaagcgccaaagaattccgcggagcacaccgccacgcccagcgcaatgaccagcacagccagcgtaaacaagtcacgcgcgcccgttcgggccacgtaccgcagcaccagcggaatgacttttttcccggcaaacagcgtcagggccaccagcagggccagcttgacgaacatccagccaagctcggaaagaatgccgccccagtctccggcgccgctctggcgcgcttccatcacggcggggatgagaaccagcagcagaatggtaaacaggtcttccactaccagccatcccagggccacatggccgccgggcgtatggaggttctggttgtcttccagcacccgcgtcagcactacggtactcgccacggaaatcgccatgccaaaaaccagtccggaaatcgcggaccatccgaacatccacccgaccagcacccccagcacggtagccacggatatctgcacaacggctcccggcacggccactttttgcacggcaatcaaatccttcaaatggaaatggagccccaccccgaacatcagcaggataacgcccagctccgcgaattgttccaccgtatgggaatccgcaacaaatcccggcgagtacggccctaccaccaccccggccagcaggtagcccaccagcggggataaatgcagttttctggcaataaggccgaaaagaagggcagcggccaatccgccgacaaaagtgagaataaggctgaaatcgtgatccatacgcgcgtgacagggataaggggtattcttgaccgccaagtcgtttttacgctatcgcgttttattttccctcacaagaacgcattgcgccgcatggaaatgcagtcgcactttttgcatgaaaaatggtcccggcaaattttcatcataccctatttgcgaccgcttctaattaaattttcccatacgggattcctatcaaatgtgttagtaaaattcgtcctgttcattcccgggaagctgccgggtcattgtcccgcactggcggtcggacaaatacccatacatcaccatcggcaatttttacatcctgctgccggacaacggaaataatccgccggcccggaaaatccaaagcaggaacgcccgccgggcagacactttcgttttcaggctcttccatgctccatgcccatacccctgaacttggaaaaattgataaaatacccccaattccatttgaatttccaggaaattaatttattttatattggaaataattgattttttcaaatctatgactgaagatgccatattcaaggaacagtggaaccttcttaagaaggagatggcaatgggagacgctcatctccagcaaaggctggaacagttcattttccggcaatacggccgggcggttctgacgcattacattaaagccctttccgtcctggagctcagccaccatttctacctgcggttccgcaggaggagccgggccgtaacggaacccattctctactggaccgtgcttgcggaaacaaccatccacatgacgctggagggagtaaaagacatgcaccccttcatctccctgccggcacgtgccggcgcaaccttccagcttgacatgttaaaagactgctaccttctttatttgagggaccggggatatccctgctggcctagggcctcccgcagaagccgcatcatccggaacaaatggaacgctccggaactggaagccgcctatttcctccggttgtgccagaacagcacggaccgtcattatgccaacgtgatgaacatcctgctggaagaaatactgcatatgctgattaccctccgccaactcaggaaccacggaaaaaacctgctggaactcagaagaagccggaactccaattcttccccgggcggcgttccgccgccgtccctccgcccgcagcaccctcccgaagacagtctttaaaaccatccgcgctttttccaaaggatacttgaaaaaaccgccgggaccttacaaaatcaacatgcagtctccataggagaaaaatctgtaccgttcccggatggcttccagataggctttcatgaccagctccctgcccgcaaaggcgctgacaagcatcagcagcgtgctctgcggcaaatggaaattcgtgatcagggcgtccaccaccttgtagttgtagggaggatagatgaagatgttcgttgaaccggaacactccctcaacggcagaccttccgccgttgccacatgttccagcacccgcacgctggtggtgcccacggcaatgacccttctggcgttattgactgcccgggcagcggcttcaggaagaaaaaaatgctccgtatgcatctgatggtcttctatcctgtccgccttgacgggacggaatgttcctacccccacgtgcagggttagaaaatcgtgggggacggatgccagcagctccggcgtaaaatgcagcccggccgtaggagcggcaatggccccttcatgtctggcgtaaacggtctggtaacgctccctgtcggatgggtcgctttcccggttcatatagtggggaagagccagacgcccgtatttttcctcatccacttcccggtcaaaccggataaggcggtacccttcctcatcaatgccttccacggtgcccaccgcctctccgaccgcaaccgtacgcccaagcttcattttgcgtccggggcgcaccatgcacttccacaacaggggattaagaacctccgcgcgtactatttcaatggaaccgtcgttggaaaaatatcttgccggaaccaccctggtatcattcaggataaaatgatccccttcccgcacatattccggcaaatcgcaaaaatgcctgtgctcaatcatgcccgtatcccggtgaatgaccatcatccgggacgcggagcggtccggaaggggacggtccgctatcagttcttccggcagcggataatcaaaatcaatggtgcgcacggccaagtgcattgccacgaatcctccgaaaggtcaatatctttaaaccgcaggtaacacaattatatctttaccctgcttcggttcatatggtatggaaggatacatgaacaacctgctgtcagcaaacatttccaacgcaaccgcctgggggaccattctggtcgtcgtcctcgtcatctttctggtcatctttttcgccatcatcgccaaattcttcaagacatggctgcgcgcccgtctggcgaaagcgcccgtctccatgagcaacatgctggggatgtggctccggaaagtgccctatcccctggtggtggacacccgcattacggccgccaaggcgggcctggacatcagcacggatgagctggaggcccacttcctggccggcggcgacatcgtggactgcgtgcttgccctgattgcggcggagaaagccggcattccgctgagctacgaccgcgcctgcgccattgacctggccgtgaaaggcacttccaagaccgtgctggaagccgtgcgcacctccatcaatccccgagtcatcgactgcccgaaccccagctccggccaaacgcgcctgacggcggtggcccgtgacggcattgcagtggcggtgcgcgcccgcgtaacggtgcgcaccaacctggatctcttcgtagggggcgccacggaggaaacggtggtcgcccgcgtcggggaaggcatcgtctccgccgtaggttccgccccctcctacaaggatgttctggaaaaaccggaggtgatctcccgtaccgtaagcgacaagggggtggacgccgccacggcgtttgaagtgctttccattgacattgcggatgtggatgtagccggcaatgtgggcgcccgcctccaggccgagcaggcggaagcggacaaacaaatcgcccaggccaaagcggaagtccgccgcgccgccgccgtagccacggaacaggaaatggctgcaaaaacgcaggaaatgcgcgccaaggtggtggaagcggaagcccagattcccatggccatggcggaagccttccgcaacggcaatctgggagtgctggactacgcccgttaccaaaacgtggtggctgacaccaaaatgagagattccatcgctcaaccggatacgcctccctcttccatcaaataaataaattccctggtttccggaaaggcctgctttttccggaaacctttatcctttatggattcactggcatacatgctcgcctccggaggcgatgacaatagcctgaaactctggttctggctgattgtcggggtgattttcctcatcaaaaaagcaatcgaattgttgaaaccggatgaaaaagatgaggaaccgtccgttccggacacggagaaccatcatgaaaaacgcgtaagggaagtcattgcggaaatgcgccgggcaaccccgcagccacagcaaacccaacctgccgcaccggcccgcgcaccgcggccctcagcccctcctgtagagcttccctcccccgccgtggcccgcaaaccgcagccgatcccggcgccggcggctgcacaacccgaggaaacagcccggcagacggcgcaaaatgtgctggaacgctacgtaaaagctacggaagaagcccggcaatccatgcgctctctttccgatgcggaacaggcggctctgcaacgtttgcaaaagagggagatgaaggaacatctgcccgaccttcttccgtcatcagccgcagtggaatctccttccctgaaaaattcccttcaccaccccaaatccctgaaagcggctgttctttatcaggaaatccttggaaaacccagagcattacgaagcgcatccttcagcggtgaataaagaatggcccttcccgggccatgttccgttcagccgtcatgctgcccccctcttattcattctcccttgcctgaaaaggtaagcggaggtaccctccatcccgcaatgacagacacacctttgcagatagccggacgccagttcacctcccgcctgatggtgggaacgggaaaatttccttccaatgagagcatgaaagaagctttggaagcctccggcgcccaaattgtgacggtggctctgcgccgggcggatctgacgggttcccacgatcccgccgccaatattctggatttcattgatccggaaaaatacctccttctccccaacaccagcggagcgactacggcagaagaagccgtacgcctggcgcgcctggcggcagcagccgggctgcccaactggatcaagctggagattcacccggacgcccagtacctgatgccggaccccattgaaacgctgaaagcggcggaaatcctggtcagggaaggcttcaccgtgcttccctacattaacgcggaccccgtgctcgccaaacgccttcaggaagccggagcggcggccgtcatgcctcttggcgcccccatcggcaccaacaagggagtactgacccgggagttgattaacatcatcattgaacaggctattgtccccgtggtggtggacgcggggctgggagcgcccagccacgcggcggaggctctggaaatgggagcggatgccgtgctcgtcaatacggctatcgccgcctccggctctccctccgccatggcggaggcgttcgccctggcatgccgtgccggacgcatggcttatctgtccggccttcccgccgtttcctcccaagctacagccaccagccccctgacttccttcctgcattaaaaggccgggaaaaagccccggttttctcccgcacccatgggtcaagaaactccgggaacatttttcgcaatcttcctgcgtatcaggaattccaggatgaagcaggcggctacaaacagcacaatcaacggaatcagataaggctggctgaagaacatctggtaaaagaacgcccccagaataaacagcatcagaagaaagcccaggatgataagcagcgcatttccctgagtctctttccggagccgccaatgggcgacgaacaccgccaggtagctgatcagaaaacaggcccccgccaaattggcgatggctaccaggttaaaggcattcgtcatcaccagaatccccagcaaaagatagaaaaaaccctccgttccgtggccccagaaaggctgtttaaaaatagctcccagctggccgttgcgcgccagagcccgggaaatgtccagcatgctgaacatggtggcattaatggctgatgccgtagcaatgagagccgctacggatacggccatgaagccccacatgcccaaaaccggataggcggcctgcgctacggccgtttccgtatggctttccagggaagtagcgggaacgttggacagtactacgtaggagagtatcaggtacaaggccagcacaaggccaatagccataaaaatggctcttggcagcgtcctggaaggatttttcagattgcccgccgtattggccatcattccgtagccggcaaatgcgaaaaatgtcaatcccacgctgcccagcaaaccgtccagccctttcaccggaatgggatccgcgcccacaggcacggaagaaccgaagctggcaagcattaaaaccgtcaaaatcaataatttgaatgccaccatgattacttccgactttccaacggccctggctccccccatattcaatgcccccagcagcaaaatagccacgctggcaaaaagggccgtggaataaatggtgactgccctgtccggtaaaaacaggcgggacgcataggctccaaaggatttggccaccagggccacggtaatgaccagcgttcccaggtaaataagggtcagtgcgccggacagggtcttatgggaaaaagcctcgttgaaataatccataattcctccggaaccgggataacgggaacccagtttggcgtaggtgtacccggaaagcagggcagcaacgcctcccagaataaaggaccaatatacattttttcccgccatcagggtcgcctgccccatgagggcgaaaatccccgctcccaccatggaccctattcctaatgcaatgacgctccacagggacagatattcttttggggccttcccgtacataagggatttagagatactacaggaatgaaacgttgacctttccgcacgggatgacacgtcctgcttattcactccgtcctgcagccccatcatgactattccggcacggctttccccttgaaccgtccgttgtcggcatgtagggtacggctgatgatcaaaaccgccatttttgattttgacggaactcttgccgacaccatacccctgtgccgggaggcttttcgccgcgctatccagaagctggacggcagaatattgacggatgaagaaatcgaacgccaattcggcccggacgatctgggagttatccagaaattgattcccgggaaaccggaactgcatgaacgcggcagggaactatttatccactattaccgcaagctgcacgcagacctggctcccgccccctttcccggaacagccgaattgctgagcactctccgcaacctcggcattcggctggccatggtcacaggcaaacgcctggaaagcgcagagatatccctccagttttttcatctgtccgaattttttcctattctggaaacaggctccccggagggaggcgtaaaaccggaccgcatcaaacgggctttgtcccgtctgaatgccgtcgcctcagaagccatctatattggagacgcccccacagacgtggacgcatgccgctctgtccctatccgcattctctccgcaggatgggccgcggaggcggacatcaaaggcctcagggaaaaaaagccggactttctcctgacccgttttgaagacctggaacgtttcttccgggaacatcatgaaaatgaaggcctttaagattgcaatcctgcagaaaacaggctaccattacccaccccgttaatatcaatccttccatgacttttcagaaagaatccggaaaagagggcctgaaaattctgctcatgctcgccagcgtcattatcatcacggccgggctgcaggcgggaaaaccggtgctcctgcccatcgttctatccggctttctggcaatcgtcagttatccgctgacgacttttttcaagagccgtctttgcttcccgcactggctggcagtgactttcacggtcatcatggactttggcattctggtgggcctgggctatctggcccaatacctggggcaggatctggccaaaacggtcacggtcaaataccagcctcttatgatggagaaaatccatgaactccgcgctttcctgattgaacaggactggaacaacctggctgaccagatgcttcaggaatttccggacctgctcaacggccagcgcatcgtggcgttttccacaggggtgatggggcagttagcttccatgctgaccttcaccaccctgattctgatcctgatgactttcttcctgggggaagccccccgcttccgggcgaacatcaataaactggggcataacagcgacacaggcatccgcaaattctccaaggccctggccggagttcagaaatatctcattattaaaaccttcatcagcgcagttacagggcttctggctttcctgctttgctattacatgaacgtggactttccgctgttgtggggcatcgtggctttcgccctcaacttcattcccaccttcggctccatcatcgcggctatcccccccacacttctcgccatgcttctgatcagccctactgcgggcatcattgttgccggcggctacctggtgatcaacacagccttgggaaactgcctggaacccatgctgttgggacgacaattcggcattgtgaccagtatggttctgctctccgtcatcttctggggctgggtatggggccccatcggcatgctgctggccgtacccattaccatgttgattaaactcgggctggaaagctccaaggatctcgcctggatcgcccagctcattgacaaccctcccactcccagattccctctcccccctctccattccgggaaaaccaacgaaagcacaaccaaggaataatccatgcattcattcgcttacaaaaacggcacgctctactgtgaaaacgtcaaccttcaggaactggcggacaaggaaagcacacccctgtacgtttatagcaaacaaaccattttaaaccactttcaccgcctcagggaagctctggcaccgcttaacgcggaagtggcctacgccgtcaaggcctgctccaacatcgccatcctgaacctcatggcccgcaacggggcgggattcgacatcgtctccggcggagaactcttccgcgtcctcaaagccgggggagatccgtccaaatgcacttatgccggcgtaggaaaaaccgagcaggaaatccgttatgccctggcgcagggcatttattgcttcaatgtggaatccgaagcggaactgcgggccattaacgccattgccgcctccatgggagtcaaggctccggtggccgtgcgcgtcaatcccaacgtagaggcgggaacgcacaaatacattactaccggcaaggctgaaaataaattcggcgtggacttcgaacgcattgaatctctttatgagatggcggcccgcgaacttccgaaccttcatctgaaagggttgcaaatgcatatcggctcccagcttacccaggcgaaacccttcctggaagccgtcaggaaagtcgcccccctggctgcttccctgaaagaaaaacacggcattgaatttttctccatcggaggaggaattggcatcgtttaccagggcacgctggattccggcgttcaggaatggtggaatgaggactgcgcccagctcacgctgagcacttacgcccaggccgtcgtccccaccctgcaacctctgggattacacatcattgtggaaccgggccgtcttatcgtaggaaatgcgggagcactcatcacgcgttgcctgtatgaaaaaaacgggaaagccaaaacctttaaaattgtggatgcagggatgaacgacctcatccgccccgccctctaccagggctatcatgaaattatcccggtcagagaacacccctccggatcctgcgtcacagcggatgttgtgggtcccatctgtgaatccggagacttcctcgcccaaaacagggacatgccggacgtgcgccagggagaactcctggccgtactgtccgccggagcctatggtttttccatgtcttccaactacaattcacggcctatggcggaagaagtcctggtggacggggaccaatggaacgtcattcgcagccgccagagctgggaagacctcatccggggagaatccattccggaataacatccccatcccgcccatctttagaatgcccttccagcggtaaaacgaaggaggggcatttcctttcaaccgtactgaatggaaaacaaggtagaattttcaagtccgccaagccacgcggagcttctttccggagacgccgcacgctactgccgtacgggctccggtggaccagtccggccgcaagtcacaatgattcgaacatgaacatgtcccgcaagagcgctgcaaccccggcgtgcgcctgagttcagccttgccctcctgaaaaaaaacacctatcatatccccgttatgccaatagccacaccagaacaatacattaccatgcttgaaacggccaaaaaggaaggctacgcctatccggccgttaacgtgaccacgatcgaagtcatcaacggcgctctccgcgctttttccgaagccaaaagcgacggtatcatccaggtttccatcggtggcggcaaattcgcctccggcagctccgtaggcaattccgcccttggcgccattgttctggcggaagcaacgcgccgtctggctgaaaagcacaacgttctcgtagcccttcacacggaccactgccagcccgaacatgtggatactttcctgcgtcctctgattgccgaatcccgccgccgcgtggaacgcggtgaagcccccctcttcaattcccacatgctggatgcctccacgcttcccatggcggaaaacctcaagctttcccgggaactgctgaaggaatgcgccgaactgggcatcgttcttgaaatcgaaatcggcgttgtgggcggagaagaagacggagtggacaactccggccatcccgccgacaagctttacacttctccggaagatatgctgatgacgtatgaagccctcgcgcccctcggcaaattcatgctggccgccactttcggcaacgtgcacggcgtgtacaagcccggccacgtcaaactgaaacccagcatcctgcgggacggtcaggaagccgtggtagccaaacacggagaagcggctcgcatgcccctcgtcttccatggcggttccggttccgaactttccgatatccgcgaagccgtttcctacggcgtcgtcaagatgaacatcgacaccgacacgcaatacgccttcacccgcccgatcgtctcccacatgtgcgaacacatcaacggagtgctcaagattgatggcgaagtgggcaacaagaaggattacgatccccgttcctatcttgccaagggtgaaaagggagtcgccgcccgccttcaggaagccgccgacaaccttatgtccgccggcaagaccctctttggcaaaatctaaaaagagttccctcaacgagtttaatgccatgcccggtttcttaaaagaaaccgggcattttttctggaaaaacccgccaacagggtaaggcgggaaacgctttcaccgagtatttatccctctgagacgacgggaaaacgaaccgttccccgtcttcttcttttctgtcccctgggcttctccgattacgggaccattaacccgcattcttccgcaaggaaaccgctgcggacaaataaaacgatagccgcacaggaaaaaccggaattattcataacagaacaaggccattcctccgctcagcggaccgcagggaacccggcagcgcggccctaccccggcgccgctttgaacacaggagcctttccccagcgctccaggaaccttaatttcctgctttgcgggattcccttacgcggtcattggcgttcaggatgcgcttgcgcagacggataaaatgaggcgtagcctccaccagttcatcaggttcaatgtactcaatggcacgttccagagaaaaaatgacgggaggggaaagctggatgccgtctcccttcgtggctgagcggatattgttcaaatgcttttccttgcacgggttgaccggcatatccatctgccgcgggttttcgcctacaatctggccttcgtaaatatcttcctgcggccccacaaacagacgcccgcgttcttccagcgctaccagcgcgaacggagtggaaacgcccgtctccatggaaaccagggtgccggtggtacgcgtggtgatgtccccggcataaggcccgtaatcccggaacaggtgggagaaaataccgtggccggacgtcagattgaccagctcaaattcaaaaccgataataccgcgggtgggaatataagcctgaataaaagtatggcccgtgccttccctgcataccatgtcttccatctgtcccttgcgggcgtgaagaagcttcatgacgccgttggcatgttcgtccggaacttctacgtacatcgtttcatacggttccgtaaggcggtcgttttcatccctcttcatgatcacggtgggacgggaaacgcacagttcataattttcacggcgcatagtctccaccagcacggcgatctgcatggcgccgcgggcggaaacggagaaaacgccggccttgtccgtatcctccacctggatggaaatattcgtccgcatttccctcatcaggcggtcgcgtatcacgcgggaagtcacattcttgccgtcgcgccctccgaaaggcccgttgttgatggaaaattccatggaaatggtaggaggatcaatcgccacgaatggaaggggctccgtatccgcggaaccgcccaaggtttccccgatattgacgttttcaaaccccgccacccctacgatgttgcctgccacgccgatggccgaatccgtagtgctcaggccggaatattcaaacatgcgggtcacttttccggaaatgcaggagccgtcgctctgatggagccacacggtgtcccctttcttcacagtgccggaggtaatgcggccgatagccacacggcccacataatcgtcccagtcaatattggaaaccagcatcttgaattcaccctccggatcggcatccttcggagcggggatatgttccacaatcttgaataaaagaggagtgcagtccacaggaggttccccctccatggaattcatgaagtaaccgtcgcgggcggaaccgtacacgaaaggggcttcaaattgttcatccgtggcgcccagctccagaaaaagctccagcacctggtcatgcacggcggcgggatcggcatgcggacggtcgatcttgttaatgacgacaatgggcatcagcccttcctgaagggccttgcggagcacaaaacgcgtctgggcctgcggcccttcaaaagcgtccaccaccagaagcacgccatccaccattttcatcacgcgctccacttccccgccgaaatccgcgtgtccgggagtatccacaatgttgatcgtgtatccattccagaggatggatgtattcttggccttgatcgtgatgcctttttcacgttccagatccatggaatccatggcgcgttcctgcacggcctggttggcccggtaggcgcctcccgcctgcaaaagttggtcaaccagggtcgtcttcccatggtcaacgtgagcgatgatggcgagattgcggaacttggaaggatctgacattgcgcgcgagagctaaaaacaccggaaaataaatgtcaagtctgctccatgaataccgactatattttcagcgtttgcaagcctccctgccgccattgccgcaagcgatggaacttttattttcctccggtgaatttatagcttccccccctcctcaaataggagtattctgctccggcataagtaatttctcaattctagataacaatgaagatttggttagatggaaagctggtggaacaggaggaagcaaaaacctcggttttcgaccacggcacactctatggagacggcatttttgaaggtatccggttctataacaagcgcgttttccgcttggaagaccacatggaccgcctgtacaactgcgcccattatctgttgctggatattccttacactcaggaagaactctccaacgccgtatgcgaaacggtcgcggcctccggcctgaacgacggctatatccgtctggtggttacccgcggcgtcggcaatctggggctcaacccattcaactgcaaacggtcctgcgtcttcatcattgcggataaaatctccctgtacgatccggacgtatatgaaaacgggctggccctgattaccagctccgtgcgccgcaaccgtccggacaccgtttgtccgcaggtcaagtcgctcaattatctcaacaacatcctggccaaaatggaagctgtgcgccagggtgcggcggaagccctgatgctgaacgacctgggtaatgtggccgaatgcacgggcgacaacattttcatcgtgaaggacggtaccgtgttcacaccgccagttacggacggctgcctggacggcatcacgcgccgggtagtgctggaaatctgccgggagctgcaaatcccggctcaggaaaagaccatgaaccgctttaccatcacctgtgcggacgaatgcttcctgaccggcactgccgcggaatgcgttcccgtgaccaaattggacggctatcagctgggctctggaaaaatcggtcctgtcacagctcgaatcctggcccgtttccaggaactggcccagaccacgggaacatcctgttagaaccagccaacccttttttggaccaacgaaaacggctccgccagatgacggagccgtttttttgtgctattccgttaaatataaaaaagaaaacacaggtaagcacattcccgcagggctatacggcagtctcctctggaaatgaaggcttgtgaccttcacggcctcccgttccgaaacgctgcagaagaatccaatatgaaaagccgcgccgcttgtgaaatgacaaggcaagcgacatcttgcatgtccggccgccacgccggacatgcctcaacctgaaaaaaggctatttcttcttgggcaggccggtttccgggtcaaactgcttagcctgctgggcatgttctttcgtctgatagaaccgaacgtaatcaatcaggaattttacaggatacccttgcccgtctttaggagctttctcgcaccaggtgccgcccacggcggaattgagaatgagatagaacggcgtacggaacggattccccgccccattggcataattagtggtattaaggtcaatggacttcaccagcttgtcatccaccatcaacttgatggaatccttgtcccattccatgacataggtatgaaaatcatcggaaagattctctatcttcacagtccctccgcgggaagcgtcccttttggacacgccgtccggactcaagtggaaagtggaataaaccacatccggctgttgggaaatattctccagcatatcaatctccccgttgacgggccagccccatttattcttgccaagcaaccagatggcaggccagatgcccttggttttgggaaccttggcacgcacttccagtctgccgaacatgaaattttttgttttgatcgtcgtaacggaaccggaggtatagggcatgaacttggtattcttgatccaatccgcggaacttttcttataattgacattggcgaacttttcaaaatgggtttccaaaaccaggcagccatcctccaatctcatattcttgggtcggcctgtataagtctgctgggagccctggttacggattactcccaactccggtttccactttttggcgtctatcctggaaccgttgaactcgtcaccccagacataaacccacccgccggggagggtcctcggaggtttggaatcttctccctttacagacatgcaaaggcatgcagtcaacaacacggcaaataggctcttcttcatacggagcaatactgcacctagttccgcagcctttcaaacaaaatacatcattcgggaccacatacctcctttcccctgtcaaatggcgaaatatcctgcaaaatgaatagaacccttaacccggcgcatgctatggtcatgatatgaaaaccactttccctccccatggccgggcgctcctccaccagacgcctgcaggtgctgtcgtgattgtggaaaacggcacagccgtcacccatcttttcttcagccgcatggcacagccggagcatttggaatgggaggaaacacctctgctgcgtcaaacggctgaccagctggatgaatattttcaaggttcccgccgcgtatttgacgtgccgctttctccccaaggaaccgaatttgaacgaacggtctggaaagcccttcaagccatcccctatggagaaaccagaagttacggagacattgcccggcgaataggacgcccatcagcatgccgggcagtaggacaagccaacaaccggaaccctgtcggcatcatcatcccctgccaccgagtcatcggagccgacggcaaactgaccggctatgcaagcggcctgaccattaaacaatacctgttggaattggaacagggctccgccactcctttcacattattcacggatgtggaacgcatgcccggaaatactccggccagtccataaaacggcaggactgaaaaattccggtcagagctgcataccgttttccgtctgaggaagaggcatggatttcaaggcggccttgggggattcaatacccagccattgaagaggcagcaattcacccgttaccctgtaatgtttgtaggttaatccggcaaacacagccagaaaaaatatcaggacggcataaagggccatccataaataatgattccgggtcgtgcgggcggcttcatccgccaactgctgtaagttccgcatagcgatcgaaggagcggcctcttcttctctcccggataattcggcagaaaatcccggagatggctcttccgcaaaccggagcctggcatcccccaaagcgatttcatcgccatcgtaaagggttgcggcgcccatcggcgtcaggccgttgattttagttccattagtagaaccaaggtcctccaggacatatcccccttccttaaactgaagcaaggcatgctctccggaaaccgactgaaagggaagcacaatctcgcaatgctcgtcacgtccgatgcgtgcgaaatattcaccgttcttcggaagaactatggttttttcagaaccgtcgggaaggtggatggaaaggcgtggcatgattcctggaaatcatgccacgcccatattcattttcaatccaaaagaccgtttgcccatcacgtataagaaaaatggcgatatccgcctttccccagaaagacagaattccatgcagattcatgatatgggttcatcctcctcaatttttatttttcccgcatactttcaaaaaatattttaagcaattatagtggcctccggggaagttttccataagtaatccactcattttaaaacattacatgaaatactgaatcaattttttcctgattggaaacagaccttccgaaactgcgacggatcatgccggacacgaacactgcgcaaacgacaatcttcaagggggacaacttgttgggaatcgctaaacaggccattttcaaacataccgttttccgggagggccgccctcccggaacatagggattggatatacgcgcaaactgccgtcctgcctttggacatgtccttcactatctcgataatttttttatttgcctggagcggcttaaatcaaaagaactcaactgaaatttttttctgctgtctggcatctgccgctcctcttcttgcatggagtttattcaccctgggttcccttccccgtccgttacatgcagacgtctgcatgacaccaataaaagcggcatgtcgctgccgctgtccctgattattttaataagaggaatttttctcttcatttattactgtgaagacagccagcatggcacaaatcaatccggggcatcgtaaaaacatccggagttcccgtaatgattcgaaatcctctttcacgggaaagtcagcggcctacaccgtggaaaaaccgtgcagccctgcacatgtcttgcgttttgaaggaaaatgtttcatattcagaccatgtttgttgacaacatccgcatattcgccagggcaggaaagggaggaaacgggctggtcagcttccgaagggccaaattcgtgcccaagggaggcccggacggcggtgatggaggcgatggcggaagcgtcattctggaagtggatccgcacacgaatgacctgcgttcttttttttatgatccaaaattaatcgccacggacggggtaggcggacaaagcgccaagaaacatggcaagaacggcaaatccgtcatcgggaaagtgccccccggtaccattatctaccgcagcaatgcatcctccatggcggaggcgacctggctggaacgggaaggcgaaggcattgaactggaaaaaatagcggatctgacggaaatcggcacccggttcacgttgtgccagggcggcctcggcggcaagggaaactggcatttccgttccgcgaccaaccaggcgcctacggaagccgagatgggaacggaaggggaggaaggcgtcttctttatggaattgcgccgcattgcggacgccgggctggtaggctaccccaacgcggggaaaagcacattgctgggagacatttcggaagccaagcccaaagtagccagctatccttttaccacgcttcagcctatcatcggagtggtggaattcgacagctttcgccgctgcgttgtggcggacattcccggcatcattgaaggcgcacacaacaaccggggcctgggacatgaattcctgcgccacatcacgcgctgcaaggtgctcgtcttcgttctggacatggctggcagcgaaggccgcgaccccattgaagaccttcaaaatctccgcacggaaattaaactgtacagcgaagacctggccaaacagccctggttcgtcgtcgccaacaaaatggacctggaaggagcggaagaaaatctggctaacttccgcatgcgtttcccgaaagtggacatcatccccatttccgcgctcaatggagacggtatttcccggctcaggaacaggcttgatgagcttgtaggttataaattcatccgttaacttattcattcaactttctttcaacctttgacatgacagcccctctctccgtaacgacagcttccgaccagcttctgtgccgtatcgccggaattggagacctcttcgccattgaaggggaattcgtcaccgggaaggaaatacccagcggacacatcaacaccacttacaaggctacctaccgtaaaagcgacgggacggaagattcctatatcctccagcgcattaacgattacgtcttcaaagaccccaaagccgtcatgcgcaacgtggaaaaagtcacgcgccacatcaactggaaagtcctgcgccgcctgaaggattccgccggccaaaccctcaacctctacccggcccggggaggacgcaactacattgacatccccggtgacggcatctggcgctgttacaactacctggccggcacgcacacctacgacgtggtggaaaacacccgccaggcctaccaggcaggatttgcctttgggtccttccaggatttgattagtgacatgaatccggacgacatcgtggaaaccatacctggcttccatcatacccggaaccgcttcaaccgcctgatggaagtggcggagctggatccgcaggggcgtctctccacctgtctgcctgaattggaattcattaaagcccgagaacaggatgtggatcggttgctgaatcttcaggaaagaggtgttcttcccacccgcatcactcataacgacaccaaaatcaacaatgtcatgctggatgaggacaccgaccacgccgtctgcgtcattgacctggatacggtcatgcccggccttgtactgtacgacttcggagatatggtgcgcaccgtcactccgcctacggaagaagatgaagaagacctggacaaggtgcgcatgcgcatgcccatgttccaatctatcgtagaagggtatctgaccgctgcccacggcttcctgacccaggcggaaatagaccagcttgccttttcaggaaaactcatcacgctggaaatcggcatccgtttcctgacggactatctggaaggcgacccatacttcaaggtctcacggccgaaccacaatctcatccgctgccgtacgcagctaaaactggtggaatgcattgaacaggaacttcctgccatggaacaatacgtcaagcgcgtcgccagggggatgtccagaaaatagggaaaagcttttccttcttccattccactacctccggggacggctatgccgtcccttcttttttatattatttgaacatggctgcccattccataatccaagaaacattacacgcaatagccaaagccatgtttgaaataccagacatccaactcaatcaatatggcaagccggcaaggatcatgttcctggctccatatgccccagacgctcccgatttctccaaaaaaccctacacaggcaatggaggctaccctcagtaccactacaacatttataaagccatccaggacataggctacgacgtcgtctcctcctccaaaccctattccgtccaattcgccaagggaaacgtggactatgtattctccctgatgaacaggttcaccatgtccaggcctgaaatattcatttcttcttactgcgaattcattcaggttccctacctgggcgccccgcccaacatccgcgccatagcggaagacaaatttctgaccaaaatggtattccgctccctggaattgaacgttccggaaggcattggactttccggagaaaaaggtattccggcccaggcccccttccctggcccctattttgtcaaaaagcgttttggagccgcttccggcggcatccgggaagacagcatctgcagctcctggaaagccgtgggttcatgcgcccggcgcctgatggaagaagggcacgaagtgctcgtggaacaatactgtgaaggcattgacgtcaccgttcccgtactgggtggggaaaaccccgtcatcctgggatatgtgcagccgaaatccgacaaaccaggcagcatcatcacggaagacctgaaactgcacgaccatctgggttatcagctggtctccgttcaggatatggagcaggacatcgccagtgacgtccggaaaatctggagcgctctggggccgatggactatttccgcatcgactatagaatcgacttcgagacgggagaacggcgcattctggaaatgaacatctgctgccacctgggcaaaagcggctccatctgcctggcggccgcagaacacggctactcccaggaggacctcctcaaatacattatcgcctacagcatggacaggcagaaaaacctccgccaatacggcacatggctcatctgacccgcaggaaagaagcggttcgcattccggtcagaacaaaaacggcagttaggaatcaggtatccggctgattgcctcaaacacctcctgccagctttccatggaagcttcctgcccgcccagggccatgccccgctcacgggcggcagcggccatgtcttcccggtagtggggctcccaagccattttagtggcgtacgtgatgaaatccccggggcattcgcacagccatccggtcttcccgtgttccaccatttgttcccaccctccgcgcctgtccacaacaagcacactcccgcttgccatggcctcaaaacccacacgcggccaattctccgtcgtatcggtaggctgcaaaacgatgtggcagcgtcggtaaaactcctgttgggacaaagacttttgatcatggaaagtctccacccaatcgggaggcctgccagtcttcacctcgctccgctggtcaaaaccgagaaaagttcccctcttccggaccggagaagcaaaatgctcgtaaatatgccacgtatccttgctgaacttatcttcatcctgccgggaaatgtgtccggctccaaaccagtccgtggaacgccctgcggcaaaaggaaaatctgccgcatcaaaatacggcctaaacgtcatgaaccggatggccgggtcgggatttaaagccctcaggcgaggcatgacgtttcccattacgttgctattttgataaagaaacagggaaatatctccccgcctcatggcttccttttccctgccgaaaagccaggtcatgcaattgacgaaaactgtccttcccgtccgttttcgtatcttcgggagagcagtcagaaactcttcattacaaaaactgatgacgggagcccctgccggaatggcctcccaatcatagccttcatgcaccgtaacacccaatttcaccatctccggataaagcccggcgccgtgtgcatttttctgggtgggaataagatgcatctccacccccatctgcttccaaaccttaatctggtgataaagctcggtccccgcaccgccgtaaagtgacggaaatccaataatgtagagagaatatgccattaattgattcatgcctgaatgatatttccccggaactgcatggaatagtcttgccgcaaggttttcagaacactttaactattgacattcaataaattgatccgaaaaaatcaataaaacaagactaaagtaaacaattccgttattttatcttcaatgaaaaagattaatattgccttcccatcctttgaatttggttcttgtccctctcaaaaaagagccgatgatgtagaaattcttagtccatattatttcagttgcaagggaagttgttccaacgtttttttagcgctttcacagccttgctctgctgctttttttaaccattcagatgctttcttaaagttctgcggacaacctcccaacccttgcaaataatagaggcctaaaacgttctgagcattcatgctaccctgggtagctttttttattatcatagcggaaagcatttcggagggggaatactcattttcttccgtttccttttctaaaattttagctatctccaaaaacgcctccgcatatccatgactggctgacaacttggaagaaacagcagttacagcttttcgagcaagagttagattataatttgaaaatctattaaaaagatcgtcgttatttctaaatccgtatttttgaagttctttcaaatattcaagattactgcttctacttccataggaattgtcaagcaacttttcagctatatctagagttacttgcttactcttattctgcgtaattttcaacaactcctcatattgaatttttatttgcttttgataaaaaataggtaatttggggaaccagtcagaattaatacctttctccaccacaccttttaaaccctgaagaaattggggatcgaccaaatctattgcgggatttccttcctctccttcttgagagcatttcaaaaaaccagccatcaaacggaatttatcagcataatcctgattaatgtagtgataaagggctttcctctcttcagaagaaaataattttaatccggaagaagaagactccagttctttcaaataagaagggcttatctcccattttttcaaaaactggttgttttctcctaatgctgtgttcaacatacagctggctatacacgaaatggttaatattttatacatggggaaattgttttttacagttttctacacattcattgtatttagcctgaatagatgccacagttatgaattgaccgaccccttttggtatcgaagatcctagacaatcaggattgtatcgtataggggggccattgactggactacaagcctgagccgcccccaaactttcactcaataatttaatcgctctatcccatcgcgattcatcacattctttagaagttttcatcatatcctcccacgctttggaatgagtatcttcagtttttctattcagttcttctgaacttgcctgtctttggtcatcacatcgcttcacacattcatcatattgttttgtaatttttcaaaatttaattaaaaattcaaattaaaaaattgtttttcataaaaatatataactaactagaaataagataaaaatgccgctcaataaatttttccacagaaattaggtaattttcatttcaagacataattaactttatatactcctcagcaagtatattactttttctgagattcctcatctagataattagcaaattcaatgtatgcattttttatgactatttccatcgtactttcatcgttgggatctatgattactgttccgttattgacaaatttctcaaaactatttgcgactgactttgccataatatctcttggattttttcctataaaatgagccaatatggtgttccagtcatatccatgtttcttcatatcattacgaaattgattttcaatcgcattctttttgtttaacagaacaatggttttaaaataattacatttactcttatcaattaaaatttgatttataaaaaaacatctggaaagatatttttgaactatcttcggtaaatattcagtatcgaatttcagataaaaccttctagactgctccaatataaattgattgtttgggtcacttaatatagaagaagaatgtttggaattacctacagctcttaatagagaagctgtagatcgaagcacgtattttcttaaatattcttgttcttttattgaaaaatcattcccagcacagtttaaattttgaccattattcacatcagaatatacattcatcgggaataataaaacaaaaaatagaaatatttttctcataatttttctcgatttaatcatatgtttgcctgcattttagtttacaatttctatattcgacaaaaataaaagataatgcaataataaatagaattccttgaattctactctcttctacagatggtcctccaatagaagagttagattgttgtgcacggtcatatgaatttaaccatcctccacattgtgcctgtaaacaattttcacagtcatttaaacaatcttgcaattttttagaataattttcaatgcattttatatacgcgttcatagcagctggttgtacccatgacatatctggacattgtcttcccaatatgtcaaatgtattagacggatgatttctgacaaaccaatataaactgtatttgaaacaggcacggcaattggctcgactttaggaattacattctcagatatttttttaataactttttctgtcgttcctggggcaataacttcagtaatggctacggtggttactgcaacagctgcaactgtcaatccaactggattcaacaactccgttaatataaattcataatatcattagtccaaatcattgtgaaaatcttccgggagactgtatctaaagaaagaatttatcctaaaaaaaccaaatgaatcaaactgtcattccttattttcaaatggaatatatacttctactctcatttatgatactaatcttagtattttactctttgtctacatgcgtcagtttcaattgctacttgcaaaaggagaaacgagaagttcgtcgttttttacgagcctgtttttttacaacatcgctaaaattacgaacattttttaaaaatatacccttgcgaatacaactatgaatccgagcctgatagcacgaccaaactctacttgaacttatcagatttcctatcatagaacattcaacttcaataccttctgatacgttagcatgcatcatgggatgcatgatgaataaatccatttccatttctacaaaacaacgggcataatactcttgtttacatgataaaaatgtctctatttttaatcgttcaatatctcttcctgcatctggcaaaaaacaaaattctttgaaccaataataatccgttctgatttttctccctgatttaattaattcagccatggtttaatggattttcatctataatacagttttttacattaggtgggatttccctgttattgatccaatgattgaggtagctctccagaatttgtactgcatgatcttcatccttcgcccgaatatgagcatcccagcataaatctctaaacgattcttctgtccacaaccaatgagacaccgagcgttttccatgtcttgaaatcatatagagttcccgactaaaaattcgcggataataaagaacctccttattttttttagttttatacaaatctagcctaacaatccaatcaggcaaagaagattctgttacaagttggaattccaaagttgtaactaattcatattttgtgattgactccatcatattttaccattttgcacatttatagttgttagattcatgtttggctgtgcatcccttaggagttctagaggaagcgtatctctttgcagcctcatgagcaatgttttgagtttttcctacaccataaccatgaataacttctggacaacatgttcctttattttctttcgtcgggagagtgcttcctcgaacgtaacatacccacatccctttccgatgttttaattcttttaatatttcttcaaccttgactccgcttctcatcatagatctttgaagggattctttagagactatggctactgttccagccgctgctattactcctgctgccagtgccactttggcaggttctatcaatgtagctgcgccgacggaatttgttgggccagtaccaagcaaagacgcatctattgcctgaaatcctaaaaaatcaatatgttgagtcaatttattgttgacaaaagaatacaaattccatccatctatttctccagcaggctccctactcatccacctgccattttggggattataatagcggtaattgtagtaaaccagccccagttcgtcatcagcgtattcgctggagaaccggaatggattatcctctgcggcattcccttccatcctgagaatattaccatacgggccgtattcgtacaaggcgcggcgtcccgctcggatgccgaagagcgccgtagtgtttttcaacaggtcgtgcgtgcagtacaggtcttccgcccaggttcccgtttcatcaaagaggctcatggccaggatgcgcgtggctaccggttccagaggatcccacagataggtttttcgcagtacgggcatcgctgtttccatcgcgttggcgacgtccagttccgcgatttgcaggtagccgtgataaatgaaccgttttttcgacatcaggacttctccttcatagacggctttctcaatccgtctgttcagatagccgtaatacgtatcgcatgctcgtttttaaaggcatggtaaaaacagttatttctatctcttcatatcattcatgagttatttcctttcatcttatcaaaatcaatcattctaatttatcaatattaaataattttagaatagtagtaatttttatagttttgacctaacatcattaataatatataaaaaaatcttatgaaattactctatatagtttcaatatttttctcctccactaatagtgataaccaagtaacacattctttataatcatatgggttaagtccactatttttttcgccaagatcaagtagccattccaaaatgattcgtaactgaacagaagaaaattttttaaaaatatccaaatcgtcacgcattctaccgatcatattctgacatgtgcaatctactaagagatctgaatctttcaatttttgaaatttgatcagctcttcaaatgaaatataaataacagcaggcaaataatatctaaaagcctcgttgctgaaaacagaaaaaaaatcccatatatatttacaatcactagctttcaaagatatccacgatttcccttgaatatatgttatatcttcaaattcattttcatctttaatgttatttggaatcggcaatatcggaaaatttatttctaaagattctttttttaataattgcatttttcttctatgaatttttcacattttgataaattattccaagcatctttcgcttgttcttgatgagttttatttccacccttaaaacatttattattaatatgactcctagcactagcaagcattaaccatgatttctttttcatttttaatatatagcaacagtcatcgcccgtacactttccacttttaccaacctctttctttgctctattcactttgtcttgtaaatatttttgttctgctttcgaacaatcaccaggttttggaatatctggataaggcacggcaattggctcgactttaggaattacattctcagatatttttttaataactttttctgtcgttcctggggcaataacttcagtaatggctacggtggttactgcaacagctgcaactgtcaatccaactggattcaacaacgccggcaatgcaaacccaaactttccttgtacgtctataaaagcgctggggaaatttcccacatagccatatagattttcctgaagcctttccatcatcggctcctaggacaaccatccaaagttttagcagttccaaagagagaactattcaaaatgattttttcaatatttgaatttaatccattaataaataacgaatcacatctaggtatatcattatttttcaaattctcaaaatatgccatcattgagttgaatagtgaataaattttaaaggctgttgaatcctcacgtggtaataacagtcccccaaaaactactccaaaaatttttgaattgtatccgtatgcaaccagaggagttccagaaacttcatttccatatgccccaaataaattaattataaactccagattttctaacgacacttgctgattaatcatatttgataatttatattgtttcattattttcatcaaagcgctactgacgacgtcttcagaatcggaaaccataatagaatattgtttcatcattttattttcaagaagacatatataataaaaatatattttattatcattcaaaaataaaatattatatttttttctttcttcatctgctttcaaaaataaaatatcatacttatcaggaaattcagcctttaaacaaggatgttcttcgacccaacattcataaccaagaaaaggcaaaatacttctctcttcacatgaaaagggaatgtatgtagacagacttttatttattatttcaatatctgaactgatttcttttatcttatgcaaagcagtttctacagctgcatccaacggggtaatattattgtttcccgcaaataaaatattacccgccgaaataaaaaataataaaaataaataaataatattcatagtcactgtcttattccattaataaatgttgcatttgtttttcctgcaggtctgttagggttatagagatgagtacgaatattacctttcccatctcttacagatgctgtcataataattctaggggggatttttatattttcatctatgttaaaattacctccaaatccttcttctgcaatttttctgtcattatcacttaatgaagcgtttttgtccggatgactatgtgcatatccaatcatcttgtcgccatcatcgcacggaggcacacttaaaggagaaacttctctatgtccgccggaagtcccaacttttcctacataatatttacaatctttctgacaaatacgaacgccaaattcgacttttacaggtttatttttctttgtttttttctctatcggagtattgttccatttttgcagatcctgttcataacgtttttccatagcttctactaccattctattcgctgccgcaaaagcttccgattttttttcatataattgaagacctaatatatcacaatatattatagaactattatctgaaaatctgtataaattattactttcttcttctccaatgggatccctgcttacccacctgccattttggggattataatagcggtaattgtagtaaaccagccccagttcgtcatcagcgtattcgctggagaaccggaacggattgtcctctgcggcattcccttccatcctgagaatattaccatacgggccgtattcgtacaaggcgcggcgtcccgctcggatgccgaagagcgccgtagcgtttttcaacaggtcgtgcgtgtagtacaggtcttccacataagttcccgtttcatcaaagaggctcatggccaggatgcgcgtggctaccggttccagaggatcccacagataggtttttcgcagtacgggcatcgctgattccgtcgcgtcggcagcgtccagttccgcgatttgcaggtagccgtgataaatgaatcgttttttcgacatcaggacttctccttcatagacggctttctcaatccgcctgttcagatagtcgtagcggcactccacccgcctgttcccctgaataaaccttgccgcctggttcagggcattataagaaacttcccattctcctgtggacgtttgaatctttgtctggttgccgtcggcatcatagccaggcgcgaaaggcgcttcttcctcccgggtgatggccgtgtactggttcaggctgttggccgtgtacgccgccgctgacgcgcccgaaccttcccgggaggtgacgcggttgccgatgttgtcatacacataggaatatgttcccccccggctcatcgcgtcggcggccagttcgccgcggccgttgtagctgtagctgtgcgtcaggtcaggagcaggggtattgaagtaatccttcttttccgtgggccgccccagcgcgtcataggcgtagtcggttttggccgggtagttggcgctgccgggacgcagatagtcgattctggtcagcagatcccgtttttcttcccgggtgtaccatctccggagggtattggggtaatcgagcgtttccaacagtccgttgacggcgtggtagccatagacgaagggatcggagccgttattgagcgagaccgtaaaaagacgtccgcaaccgtcatattcccaggccgtctgctggacaacgccctccccgtaatgcagactgtaacccgaaggccgccccaaaccgtcgcgcagatagttgagcgcgcttgccgccagccctgccgcagtttccgattccgcttcattatattggttgtaagccagcgtcctcgtgccggaatcgtccgtgacctgcgtgagcaggttaaggtgattgtaggtacaggtgatggaaggggtcgcgtcgttgtgagtgacggagaccaggttgcccgtctgcggatcgtaggcataagaagtcgccagaggcgttccctgcccgtccgccgtccgggcctgtcgtttaaccgccagcctgttccagtcatcgtaagagtagctttccccatggccgtcggcataggttttaaccgtcatcaggccggaggcgtcgtcatagctccacgccgtcacgtccccgtccgtccgttcccgcggatcggcagcgatggtttctcccggaacgcggaacgtcatgagggataccagcctgtccgcatcatcgtagccaaagacggagggctgaagggccgtaccgtattcggcggttttgcgtccccgcgggtcgtaagcgtagcaggccgtgttgcccaaagcatccgtgacgcaggagggagaagccgtggacgggtcatactggatggcggtcgtattgccggcggcatccgtcctggctgtttcacggccggcgatgtcaaagacggtaacggcggcattgccgcgggcgtccgtataagtctccgtgctgccgctggccgtataagcgcgggaagaggtggtcagaactcccgcatggtctttccgggatacggcgtacccgtctatgacgacagtttccgcaatgacggaagaagccggagactgcgtttttatcgtccggccggccggagctgtgtattccgtccattgcagggtttcattgccccgcggatcggtagagatgttttttccggccagcaagggggacaggaaggaaaccagctcggccgtgctttccgcatatgttgttccctggctgttgcagcgcgtgactgtggttacccggtacacgccgtcttcccgctgccggcgggcataggcgtactccgtgactagggagttggcggatgtggggttttcggccagcttgagcgtggttttgacgatattgccaaacgggtcatagtcataaagcaatggagccattccatccacctgctgccgcaaaagcctgttgttcagatcaaaagcgcgccggtcatgaataaggccgccgttggcgttcgcccgggagacgcgcaccatgttgcccctgccgtccgtgacggtttgttccaccagcgccggttctccctccgcccggggaagcagcgtggaacggaccacgccttccgcggagtattccgtacggtagaggagatgcctctgccccgtgccgctctgttccagtacggttccgtccgcatggcggatagtgacgagcgtcgcgcccgtcggcgtggtgacggtttccgtcaggccgtccgcactgtaggcatgcgtattgctccttcctaatacgtccgtttcctgcaccagctgccccagcaaatcgtaagccctgctttccgtcgtcgtcatggggccgacgtcccggcgcgtttgcaggattctgccgaaggcgtcccgcgtgtagctgacgatggtttcaggcgtgacgattgtttctccgtccgtgacttccgaccggctgacttccaccagctggcgcgccgtattgtaggagtaagtagtcatgatgccgtcttcatccttttcccacaaggggccgcagcacatcatctcccgttccgtcaccctgccgttgccgcgcgtacgcttaatccaccggttttccttgtcgtattcgtaatccgccgtatccgtcagcgtccaggttccatccgtcagcaaggcgtatttctcaacgcgcgtgttatttccctgagcggaaacgtacgtgactttcctcgtgctgtgccccggcacggcctgccccgctatctgcgtttccctggtctccctgtagagggcgccgtactggctggccgcctcatagccatagaccgtctgcacgccgctggcggactgcttcatcttcagcctcccccgggcgtattcgttaggcgccgccggcagccacgtttccgtcacttccagctgctctccctccgcgcccaacgccgtggtgcgtttttccacacggcgcacatggttggcttccgtataggcgtaatgcgtatccgtcagccgggcagcgttcatcgtgagcaccacgtactggtgcgcaatatccggatcggcatggtcggagcagcggtaataggtgtaggtgcccttccttcccccgcccgcccagggttccatccggacggtttcacgcccgaaggcgtcataagaccaggtcttttcacttccgtcgggggccgtctcccggatcagtttgcccgcggcgttataagcgtaagtcgtttcacgggcatagtcggttccataagcctcaatacggctggtgcacaggttgccgctgcggccctgttcataggtttcgcacacccgggaaataggagcgccgttttccccgcgctgcacggtagtgaagagtttccaaatccccgaagacacctcctgcctttcacggatcctgtaaatcgcgtcttccccttccccctgggacatgcaccaggcccctcccgttccctgccagtagcgggtgacgtaaggcgcgcgcccttccgcctgctccgtgacggtgagcttgccggtctccgcattgccctcaatggtgaaggttttaaaaggcgtccccgtaacggcgtaaagaccggtggaaacgtttttggcccccacctgctcgggcagataaaaggcgatcacatagcccgtattcgtcacgttctcaatattggccagaccgtcccacaggttccagacctggcggatgacatcatctgcgcttcggacgatgtccaggtaattggcaaaatcctgagccgtccatgaagaacccagcctggtccggtagccggaggccgcgcccaaagcggaaacggaagaaccgccgtagatgactgtattgcccccggcgttgctgaccctcatttccgccgcgctggcggaagccgagacaacacgcccctctgccgcggcatacgccatggaaacggaacccgtccttttccgcgagccgccgatggagcctgcactagccgcgccggcatagcagtaatagttggcgcgggtgcctccgttccggatctggaatgccatgtcagcccccagctcccgaccggaagggggcagaatacagctggccatgggatgcaggtattgcagggctgcgggcgtccacaacctggaagagaagtgataagccacaatttccagcatcccgtacggcacgccttccataccgcggaaggaaccgaagctggtgcgccataccatgctggttttccgcgtctgggcagttacccgtctgcctgcggaagagaaccttccatatgcggaggcggaggaaaccaggctgcgcacggcagacgtactgggggaaccgccccggttgtccatgcagtcatccagggaaaaaggattgtccggatcagtctcatcctcatccccgccgttgtcgccattagggcatggattgctggaactgctgttgggagaactgctgcttccgctgctggagcctccgcatggatcatcgtcgccctcgtcgttgttgtccactggctccgtttccgcctccgggggcacataggaagaagaagaacccgtttgccggttggtaatttccaccttcaggtcaaaggagaatttggcaatgttgttattggcattgggaatggaaatattgctatagtccacatgcgcccgatgcattccgggctcaatgatgaaagaagccgtctgcggctcgtaactgccgcctccgtactgtccgcgcgggccgatgtccagccgttcttctccatccacggtcaagttagccagatcgtcggcgcccatggtcaccttgcattcggccgtttcatcaggccccagctccctgacttcaaaatcccagtcccagcttctttcaaaagcgtccgttggcgcttgttcgtcgatcgcggagggagctccgctattggaattgctcatgcccgtcagggaattgacatcgttatcaaaggattgttctttcatggtttgaatcggattagctattgaaacgcaaacattgcatcatcccaatcttggaaaaactgcaataatttttatccgttccttatccataacaacaaaacctcctgtttcaacacgtccaacacgggatgccccctggtctcagccgtggttcaataaatggtaaaaatttcttctctgcgcttccgaatggaaaactctggcccatatggagaattccggaagcaacatatccaaatggcctttaactgcgcgccatgaaacacagcaattttccatttaacatggattcatgaactcttcaacggaaaaagcatgatctccctgaattggaaaagaaatccaaaatccataaaaacggttatcgccttcgggcatgttcagcaacctcggcatgtctgaatggaaagaaagcaggataaaccaccacttcccgagcctccacacctgaatttacaaggaaagctgctccttcaaacgctccagcagattgccgcaaccgtcctgaagcagttttaccacatattcaaagccttcctgccccccataatagggatccggcacttcttcatccggaaaacgagccgtgaaaaaacacatgggcgctatcttgcctgcccactgtccctttttatccaaccgtttcaaatcccgcagattttcacggtccattcccacaatcaggtcaaattgttccaaatcctctttccgcacgaggcgcgacttaagccccggatcctcatatccgtattttttcagcgccgtcagcatccggctatccggagggcagccccgatggtaaccgatcattccggcggaatcgctctcaatcaaatgttccagaccttgttctgcgaccatttttttgaaaatgatttccgcggcaggagagcggcagatgttgcccagacagacaaacaggactcggtaaggttcgggagcactcatggacgtcatttctttttcaggataggcaggcggcctccccatttcaagagggaagagtttctgcacgggaaacggaaacgcccacgaatatggcatggggcagagaaagaaactgcgccgctcattcaaaaataagattctcctgtgtttcggcttgcgttaaaggatgtccggctgtagattatcgcatggcagatttccctcttggattaagttttgatgacgtgctcctgctgccccgcctgagcgcgattcttcccggcgacgcggacatcagttcccagcttgttcccggctttgacatgaaaatccccgtgttgtccgcggccatggataccgtttccgaatcggaactggcgattgccctggcgcgggaaggcggcctggccgtcatccaccgcaacaaccccattgacatccaggcggccatggtttcccgcgtgaagcgttttgaaaacgcggtcatcccgaaccccgtcacggtcaacaaggacatgacgctggaggaagtccaccagatcatgatggaccaaggctattccggcttccccgtcgtggatgccaaccgcaagctggaaggcatcatcaccggccgcgacatgcgcggtgtggacgattaccagaatgtccgggtcgaggacgtcatgactccccttccccgcctgattacggcggctcccaccacgaccattgaggaagcgcgccacatcctttacacccaccgcattgaaaaacttcctttggtggatgaaaacggcgtgctgggcggccttatcacggaaacggacatccagaagcgcgccatgtttgcagacgcttccaaggatgaacacggtcacctgcgctgcggcgccgccgtgggtgtgggccccgattatctggaccgagccaaagctctgatttccgccggggcggacgccctgttcattgacgccgccacgggacacacgacccgagtgatggacgtggtttccaacctccgcaagctgacggaccgtcccatcgtggccggcaacgtggttacggcggaaggggccgccgacctcatcaaggcgggcgtgcaggccatcaaggtgggcgtgggtcccggctccatttgcaccacccgcgtcatctccggcgtgggcatgccccaattcaccgccattcaggaggtagcctccgtggcgcgtcccgcgggcgtcaccgtcattgcggacggcggcatccgctattccggggacattgtgaaagccctggccgccggcgccgacctggtgatgctgggcggactgctggcaggtacggaagaaagccccggcaaagtggttcattaccagggccgccacttcaagcagtatcgcggcatgggctccctgggagccatgcgccgcggctccggcgaccgctacggtcagaacagctccggcaaactcgttgcggaaggcgtggaagcgcgcgttccgtacaagggcatgctggcggacgtggtattccagctcatgggtggcctgcgctccggcatgggctacctgggcgcgcacaacctggaggaactccggaacaaggcccggtttgtgcaaatcacctccggcggcctgaaagaaagccatccccacgatatcaccatcacggaagaacccgtcaattattcctgttaactcctccctcacatggacgacaagcacctcgtagccgtcattgacttcggctcccaatacacccagctcatcgtgcgccgcgtgcgcgaactgggctacatggccaagctgtatgcgctggaagacctggaccagattcacgaacccggcgccgtcatcctttccggcggccccaaaagcaccacggacgcggacgccccggacattgactttgaatggctccagagcctgaatgtccccgtcctgggcgtgtgctacggcatgcagctgctgaacatcaagcacggcggcaccgtgaaggccagcaacaagcgggaatatggccccgccgccctgctgccggaaacctgcgcaggcctgtaccgggacatgcccccctcctcccaggtatggatgagccattcggacacggtggaccatctggcggaaggctgccgcgtcatcgcccgcaatgcggaaggagtccccgtctccctccaatggggagaaaccaccttcggcatccagtttcatccggaagtgacccattcccatgaagggcgcacaatcctgcgcaacttcctttcctgcgcggccaacctcaaaaaattcgacatcggagactttaaaagggaactcatccgggaaatccgggagcgcgtgggcgacaagcaggtggtctgcggcgtctccggcggcgtggacagcaccgttctggccgttctgctgcatgaagcgggcgtgaacatgcgcgccatctttgtggataacggcctgctccgcaaaaacgaggcggaggaagtgcgggccaatttcgcccgcatgaacgtggaaattgaaacggtggatgcttccgaacgcttcctggcggctctggccggagaaagcgatccggaaaagaaacgccgcatcatcggaggcctgttcatcgacgttttctgggatgctgtgggagacgcggaaatgctcgcccagggcaccctgtacccggacgtgatcgaaagcgcctccaacgccaaatccaaggcctccgtcatcaagacccatcacaatcgcgtggaacgcgtgctggaactccaggagcaggggaaagtattggaacctctggcggaactgttcaaggacgaagtgcgggaactgggcgcttccatgggcatcccgcatgatattctgtggcgccaccccttccccggtcccggcctggccgtgcgctgccccggcgtggtcaccaaagaacgcctggacatcatccgggaatgcgatgccatcttcatcggcaacctgaagaaatacggttggtacgacaaagtctggcaggcctacgccggcctcattcccgtaaaaacggtgggcgtgaagggggacgaacgttcctatgaatgggccaccaacctgcgcgccatcgtgtcggaagacgccatgacggcggactgggtggaactccccccggccctgctgagggaaaccagcaaccgcatcctcaatgaagtaaagggcatcaaccgcgtcctttacgacatttccaccaagcccccggcttccattgagtgggagtaaagcttccgcgccctgttgacgctcgttcagcagggtgcctccgctcctcctctccggcaataaggatcaagaaaggagaaaataatgactgaactggaaaaatgcatggcgggcgaatggtatgactgccatgacaaggtgtttctggaattcaaaaacaagacgcaccggctcctgatgaaatacaattccctgccttacgaccataaggaggaaaagcggcaggtgctgcaggaaatgctgggcagcatcggcgccaaggtctccatcggccattccttcatctgcgattacggccgcaacatccatatcggaaacaacgtcaccgtcaatacgggctgcacattcgtggactgcaacaggatcaccatcggcaacaatgtgctgatcgcccccaacgtacagatttacaccgctacgcaccccattgagctggatgagcgccttactcccgtggaaacggatgaaggagttgaatacattcgccatacctacgctcttccggtaacaatagaagacggctgctggattggcggcggcgtcattatcctgcccggcattaccatcggaaaaggaagcgtcatcggagccggcagcgtggtcaccaaaaatattcctcccgacagtctggcggcggggaacccctgcaaggttattcgtaaaatcaacgggagtcgggaacaatgatcaagctgatcgcttttgatctggacggaaccataggggacacggtccccatgtgcatcagggcatttgaaaaagcggtttctccctacgccggccacacgctgagcgaacgggaaatcacgcagactttcggcctgaatgaagtaggaatgatcaagaaagtcgccggagaaaaatggcgggaagctctccatgatttctacccggtttatgaagaaatgcatcaatcatgtccggctccgtatgaaggcatacgcgaattgatagaaaccctgcaaaaggctggcgtgcttgtcgccctgattaccggaaagggagacaaaagctgccgcatcacgcttgagcaattcggcatgcgggatttgttctgttccgtcaaaaccggagcggaagacaggcccaacaaggcggaagctattgaagagcttctgcacgacttccgcttgaacaaagatgaattttactatatcggggatgcggtttcagatgtggccgcctgcaaaaaagcgggggtgacctgcctgtccgccgcctgggcaacgaccgcagacgtcggcggattggaaaaagccaactcctcaaaggtttttcccagcattaaggaattgacattattcctgtccattgagaaataattagaagatcctcctcacttggataaggaaaaacatgatggaaaaatttcaaaaactggcccttctgattgatgctgagaacatcgctctggataatcttgaaagcgtcattcggaaaatatctgcatatggccgcatcgtgattcaaagagcctacggcgactggagcaaggaaagtttaaaaaactggaaagactcgctaaaccggtttggcataaaagcggagcagcaatttaattatactccccaaaaaaactcgacggatatggcgttgactattgacgccttggatttattgtatcaatcgtcttacgatgcccttgccattgtttcgagcgactgcgatttcactcccgtttccctatatgtcagggaacatggtatttatgtaattggtatcggagagaagaaaactccagaggctttcaaaaaaagctgcaatgaatttattttattaaaaactgctgactctaaaatagataatacactacaaaataagccttctcaatctggatcagaaaaacgaaaaaaatccctgagtctattcataaattacttaaggaggcatttgaaacgcacaaaaaagaaggatgggtagccttatctcgggcatcatcttatattaaaaataaacaacctgatttttctttaaaagaatactattccaaattttataaactcattcagtattttccggaaaaatacaaacttgaaaaatcgcatacaaaatatcaatgcaaataaaattatagagttatcttctataactatattcatctgattctatcttggaacaagaaataaattcctgttttttatacgctcatttaacgcaaaaacagttccttcctgccatggataccggcgccgtcatcctcaccacctttctctccaccattcccgtttatcttttctttgccacgggtttctatctgcgccacaagcaagtcatccaggcagaccatgacgcgcccatcatgcgcatcgcgatggatgtggcctatccttgcctcgtcttccacagcatcatgaagtacatggtgctctccggaaatgagacgctcagcagcgtttccttttccctccaggccatcgcagccggggccctggaacttctgctcggcatcgcggccgcatggctggtcgctaaactgctgcgcatgcgcatcggcacgggccttcgtacgttcaccctgacggcgggagtgcagaactacgcttttttcgtcattcccatcatccagatgctgtttgccgccggcaacgatcccacactgggcgtccttttcgtccacaatgtggggtgtgagctggtcgtctggagcatcggcgtcatcatcatcgcgggcggcccgggcaatctgaatatgggcgttttcttccgcggccccctgctggccgttatcgtgggcctggctcttgcctggtccggcctgggaacctatgtagcccaaccgcccctgatgaagactcttgaaatgatcggcaactgcgccactcccctgtgcctgatcctgttcggatgttccatgcgggatttatggcataacatgaagtgggaacccaaacccatcatctgcggcctgctgacgcggctggggctggcccctgcactgctgttcctgatggcttatttccttccggtggatgattatatcaagcgcgtcatcatcatccaggcagccattccctccgccgtcattccggtcattctggccaaacgtttcggaggccatccggacctgggcactcaaatcctgctgacaacgacggtggcttccttcctcacactaccctgctggctggctcttggttccaccctggtcgtaccattgtattaacgggataatggcgacatcaatccccggatggtccgggacggcccgcttgcccaacatcttccgcttttccggaggagattccgttcccggtgtcctgccccttgatggaaataaaaccaggctgcaaggttcggcggcggaacaatttccctgctgaaatatccgcatcctttccgtctccatcctgcattccatgctgaatgcttccctacctttgggttgactccccagtcggatatgtattgaatggattcatgaaatttcctgctcctctctgcgccgccctgctgccggtcctgttttcctgcgcggagcaggtttcccggattgaacacgttcgggaggtgcccttaaaaaccacggtggttcctgcggaagacgtaggcatgcaccgcacccaggccacctatctgctgcatggcgccgtctcccagcaacagcgccttcagcgtctgggtcaatactacttcgtcacatggaacgatgccaatccggaacaggcggcaaccctggtcatgatataccgccaaggaaagacaggttcaaccgtcctgacaaaatccatttcctatccagccgggagaaaaggcggcacgcaaaactccgttttcgaattcatcggggatgaggccagagaaaaaggggaagtcctcgcatggaagctcgtcctgaaggacaaccgcggcaaaacgatttccgaacgccattcttatctgtggggggacgatcattgactcttcggcaaaaacaccgaagagccgtaaaatcacccggatatacaggatgagacctgcagtttccggcagtctcgccagcctccaactccgttaataatcctccggaatatgggcacgcttacgcttcctgccgtttggcacggcgtttgcggacagcgtcggcaagggtttccagcacttccactgtcgtctcccacccaatgcactggtccgtgatgctcttgccgtacaccaggtcggaactcaacggctgggccccttccacaatgttgctttcaatcatcacggcaacaacctgttcggacccgctggatatctgttccgcgatattggcggccacagccggctgtttgcgataatccttgcaactgtttccgtgggagcagtctatcatgatgcggttgttgatgccggccttctgcaaagcttcttccgcttcctttacatgatcttcatcaaagttcggccccagggaggaaccgcgcaagatcaggtggcaggatttattgcccgtagtggaaacaatggcggaaactccctgcttggtcacggaaaggaagcagtgagggcaggaggaggaaacaatggcgtctacagcgatttgcaggctgccgctggtgccattcttgaatcccacaggcatggaaagcccggaagccagttcacggtgtacctggctttccgtggtgcgcgcgccgatggcgccccacgtgatcaggtccgcaatgtactgcggcgtgatggtgtccaggaactcggtagctgcgggcactcccatatcccccaggcgcagcagcagcccgcgggccatatggagaccgcggttgatgtcaaaggtatggttcatgaacgggtcgttgatgaggcccttccagcccacggtggtgcggggcttttcaaaatacacgcgcatgatgatcaccagatccttttcaaagcgcgccatttgttccttcaggcgggaggcatagtccacggcagcctggggatcatggatggagcatggccccaccaccaccagcaggcggtcgtcgtggccggaaatgatgttctccgcattcttgcgggtcgtagccaccattttggcgatttcggtggttgccggataatccttgattaaaatggcgggggaaatcaggggctcaatgtcttgaatgcgtatgtcgtctgttttgaaccagttcatgtctggggcttattgagaggtttttgagagaagttgaaaagaaaaaaatacggtttgcgggctttatgcctgaatataccgcggggcctcacggccataagccggaagccccgcaaaatgaagcggccgcgcctcccgacaagaggcgccgtcatgcattaccaggaagtcacattgtcttccgtcaattccggattgttgatatgaccgtccgccgtgctgccctgcttgtccttgccggtgctgtaaacggccacgttcttggtcaccatccgggaacctacctgaacacggggagtacggtcgtcagggttggcattcaaaatgatgtaatagggagattcccagggatccatcaggcccacacggccgcggctttcaaaaaacaggccgggagcgccttccacatccgtagtcgtcgtattgaaataagccgttttcttgggattcaactttctgtcctcatccgcccggtccatataattggtcaggatgctcatgatgcggctatcgtcgtccacggcggttgtcacgtaatactgtccgtccttgtgggcctgcttggtcatttcccggctgctccaggccacgggaacgcggccgttgtccagcatgtaattttccacagccgtctgcagaccgttgcagtcgcttcgcgccgtggtaaccttggatttttccatcacgccgttcaccaccgtcatggcgatgccggccagcgtcaggataatggcaatcaccacaagcaattcaatcaacgtgaatcccttggacttacggttcaaaaaaggtgtcttcatactttgccaagagtagcgcaattacagttcagggcaagcggaaaacaaccggcgccgcctatttcaaagcctgttcccggaatggcagcagacggaataaccccggtgcacaaacaccccggcgccttccggcagccggggtgttaaaaagaatgctcctttagttggaggggacaggggtttctgcggaagcaggggccggagcctgagaagaagcggcttccgcctcagcagcgcgcctgcgcagctcctcctgctggagttcttccgacgtcttggcgggaatggaagcttcctgcctggcggcagtcttcatcatttccgggctcaacaggctttccgaactcttaacgtgctgccggttgatcagcatgcccagccccagacaaagaaccatgaacgcggttccgaagtacaccgtggcttttttcagcacatccgtcgtccgggcgccaaaagcctggtccgtaatggctgcgccaaaggcagctcccagcccttcctgcttgggcctctgcataagcactacgcccagaaggagaagtgatacaatcaccaaaacggcaaaaagtaactgaatgctgatattgagtgaatctgctaaaaaaaggttcatgagcgcggggagtatgtgtgaattcgaacggtttgtaaagtctaggaaatgatttcgttatgctcgttgcagacgattttcttggggatgatgggcttgtccgacaaggcaaaactcataatgaccacccgttcgcccgtcttgattaaatgggccgcaccgccgttcatgatgatgttccccgtgccggcaggcccctggagagcatatgtttccagacggttcccggacgtgacggacgccacgagaactttttccccgggccacaaatccacggcggccatcaaatcggcaggaatttcaatactgccttcatattgaacatcgccacgggtaatcatggcgcgatgaatttttgattttaactgctcaaccaacatgacgttcgaacaacaaacccccgatcgcccctccggtcaagccgtcatcctccattttacggttttctgtgtcttactccccctcctccagcgcttccgcggcatgggcggcatcccgggcaagctggcttttcaattcttccaaagaggggaatttgatttccggccttaggaaacggaccggttccacttccatctcccgcccgtaaatatcccccgggtggccgaataaatgcgtttccagcaaaagtccccccgtctcaccttccacggtggggcgcacccccagattggctacgcctccgtattttttgccggccacccgggcgcgcacggcgtaaacgccatggggaggctgtaacccgcaaccgggtcttatattggccgtggggtagtccagcaggcgccccagttggcgcccgtgaatcaccgggcccttccagcggtagggacggccaagcatgccggcaacctgtaaaaaatccgccccgcgcacggcttcgcggatccgggtgctgcttatgcgctccccgtcctgcagaataggaggaacggctgtcacccggaacccgtagcggcaggacagcaggcgcagggtttctacattccctgccctgccgcggccaaaatgccagtcctctcccacggcaatctgagccacccggcaggaggaacaaagttccccaataaactcttccgggctcatggacgccagcctggaagaaaattccagcgacagcaccgccttcacccccagctcttccatcaaggcaaatttttcagcatcttcccccatgatggcgggcggcacgctttccggcctcacccgggccagcggatgggtgcggaatgtcagcacggcgggaattcctccgtcaagagcagcccctttcaccgccgcggcaatcactccggcatgtcccagatgcaccccgtcaaacatccccatggcccagtgtacgggggcggcaaggcttttcaatcccttgaattcccggtaaatgaccatatgctacccggcaatcagaatatccgccagctccttcagggaaagcatggcccggaacagttcctccctgggcgcggttttcagggtgtccaccgtaatggcgcggtccagcgtaaaagaaccggacctggtgcgccggagggcgctcaaatgcgctccgcagcccaatgcctttccaatatcataagcataggatcgcacataaaaacctttggaacattgaacggtaaaatccacttctggaatggccacgcgtgaaattccgtggccaaacacttccacaggccgcggctcccgcacaatttcctgacctttccgggccagtttgtacagcggcaccccgtcctttttgatggcggaaaccatcggaggaatttgttcaaaagctccgtcaaaccggtcaaacgcttcacgcacggcctgttccgtcactccgtctacggaatactccgccactatttctcccatggcatcttgagaggaagtctccacgcccagcataagggttccggcgtattccttgtgttcgcacatcaacttgtcctgaagcttggtcgccttccctaccaccagcatcagcaatcccgtagccatgggatccagcgtgccgcaatggcctattttcttaattcccagggaacggcgcgcaattgccaccacatcgtgggaagtcatgtcccgcgccttgtcaatcaacaggacgcccgaaggaacctggatggaatctgaaacattcatgaaattttctgtcggatcacgcgttccacttcttcccgcatggccttcaggatagtaaggcgcacttcttcaataggcccccggatacgcactccggcggccatggaatggccgcctccgccgaaacgggaggccagctccgcgacggatatttcaggcgtcttggatctcagggaaatacggatgcggggatcgtcctccgtttcttccagataagcggccagccagactccctgcacggaacgcagaaggtcaatcaggccttccgtatcttccggacggcttccaatccgggcttttgcctcattcgtcaggcaaaacgtgcaaatcctgccgtccggcgtcagcttcattccgttcagcgcctcacgcatcaactgcattttcacccacggcttttcctgataaagctggcggttgatgtcctggacgtcaacgcccatccggatcaaatccgcagccagttccatgacggccgccgtcgtcatctgatattggaaagaccccgtatccgtgctgacggccacgtaaagggcgtctcgcatcaccggagtgacgggaacgcccagatacttgaaaaagtaatataaaaccgcccccgtggcgcattcgtccggtaaaacgcactgaacgtctccaaacagctcgttcgtccgatggtggtcgatgttcgcccacaccttcactcccgccaaagcctccaggctgcgttctcccagcctcttgagcgcgccgttatccacggaaatggctacttccacatccaccggctcatcaggcgtgggaataatattttccacacccggcataaaggccagattggaaggcaccccgtcctcgttcatcatcaccaccttctttcccatttgcttcagggcttcccccaaagccagcgtggagccgatagcgtcgccgtccgggtgaacatgcgcaattaccgcaaaactgccgtggctgcggatcagatctgccaaaggcgcgaattggggacaatgtttccaatcttccatatgcactgccgtgtttttatagaaaaagccgcacctggacaatcaccaagtgcggcttgaaaagtcgtacttaatcccggaagaggattacttcttggacttcataaccaccggagccacatccacggcgggctggttcaggtcattgaacttgggcaggggggtcaggggcggagcaccctgatcctggcagcagcaggaagccatgatgctcgccgcaaaagcggcaagagccataacggtaatcttcttcatatgcgtggttaaatgatgggtgataaaggatatggaaatatcttggagcataaaagcataccatgcgggcgcccgtcaatcaaatttgcgaaaatctcccaaggagacgcctttcccaaaatggcaagacgcataaatcgctcgcccggggttatctgtaattataatctctgccaagctgtatccttttcatgcccttttccgtcaaaatactccggtttttcggcattctcctgctgagcctctgcgcgctcggcgtggccggcatgacctgggcgtacctggtagaacccaatcttctgtttgtcaggaaagtggactaccgtgtcccccagtggaaagggaagggaacacccgttaaagtcgttattgccggcgatttgcacctgatgcccaccgcgtttgatgaagtgagggccctgcgctatattcagaggatcatgcggctccggccggacctgattctgctggttggggactatgcccggggaagcagcgaaaacgccagcatggatcccgccacggccgcccggctgctgaaaggcctgacggctccctgcggggtcttcgctatccagggaaaccatgatttcaccttcggctggaacaactggagcagggaactgaaacaggcgggaatcaccgtgctggaagaccagagctctcttgtcacgttcaaggacggaaggcagctccagctttccggaatattggatacgacgcgcaatgtcagaaaacggctgcccaaacgccagtcgccggacatcccccatttcctgctttcccaccgtccggaaacggaccacatactttcccatggagacgtggacatcgtcatcagcgggcacacccacggtggccaggtttgccttcctttcggcctcctgcggtttgaagccagcccggaccatgccctaccctacacctatccctggcatatctccggcggcaatacctacctgatcaccaagggactggggacaagcacactccccctccgcttcaactgcccgccggaaatctatctgctggaactgcattgacccattcctcccgttaaaaatgcagtcccttccttcccggttccctccccctccgctccacgccggcggcaatccataaggaaaacggaaaagaacggccgggttccatagtttcaaaggagccggttatcaaacccttccttcagccttaaaatctttctggccgtcatccggtaaacaggccggtaaaggtgctttttcaagacggccgggagcgttcttccgggcagcggaccgcgcagcagcccggcttcacgcataacccgttcgtaacgttccccttcataacgccaattataccgccagggcttgtgtactccctggtaatgaagaatgcccggttccaaagccgcttccaccgcctggcgcggcgtgacgccgcgccagaactgttcccggggatcgtttttcaaaatgcggcgcgtcaagccgtcatgccagttccagcgcgggtgcagaggcacagtcagctcgcacagggctccgttcaaggcatcctggtccggacatgtcagcctgtcccggtgagtgacggcataatccagcacagccctgaccagattcctctcccggaagacatccacattcatcagcagcacgccggaattgaaatatcccgtgcaggtcagcggcatctcaagacgttcgttaaaatgggaaccgggtctggaaaaattctcaaacaccacccctactgcttttccgtccatattcgtccggaacagctccgtcaaatcccggcaaaccagaacgtcaatgtccagatacagaatattgccccgctcttccttcaataattccggaatgaacacgcgtccccaggctgacaccggccattgttccgtatgggggaagtcgtgctcttccaaaatgccggaaacgtctatgaactccagacggcaatcgaacggagcggccagccgctccacgctcgcccggttctctccgtcaatgccgtcggaaagaacgtaaattttgtaaaaagtctccggaccggcagtattcagcaaagaaaagacagtaacgctcaaaggcagaatgcccctgttgtcactggccaagacgacggcaaattcattctttttcatcggattatccattcgggtgatgttagcggcgcagcaaccgggctcccgccttgcgcattttcttccagtaataggaaaagtccaagccggattttccgcccatccaggctttcagcaattctccttcccggcgggacaggcaggcatcatcctctgcgggacggtacagattttcctgacggagcatatcggccacctttcgggtaacctccttttggacggcatgaggggcgtatttgcggatgttcctcacgcccattaccagcattttcaaaaatgccgtcctgtattccgcaagaactccagcttctttccattccttcagcaccagctccgccaccgtcaggtaatccagagactggagggaactgccggacgcaaaaccgctggtaatggatccggcccgcttgcggtaaacgtaagccgccctgctgacgacgcaaacccttctgcaccacggaaaaacggcgtaatggaaatacaggtcttcacaggcaacgccctcggggaaccggatgccatgcttttccacaatggaacgcctgatcatcatgccgcccgctccatgatgtattttcccaatggtctccggagtgcagggaagccaccctttttccggaggggccatgtcctccggcagaaaccggtcctcccggtcgggggcggactcgtaataataccggaacccgcatgccagcctgtcggcatccagcgccttcgcacggcggtacatctcctccagcaaatccgtctccagccagtcgtcggaatccaccagaaacagatactctcccacagcatggttcatcgccagattccgggaacgggataaaccgccgttttccggggcctgcaccactttcacccgcgggtcccgctccgcgaattcccgcagaatggacagggagccatctgtggaagcgtcatccacgcaaactacctccagttcacgaagcgtctgagagcaaatgctttccaggcactgggccaggtacggctccacattgtaaaccggaaccagcacggaaatgttcacgggagccgtcataagccatgcggaaaatctgccgcccttatttgttcaaatccttcctgcggcggcagaaaaggctccagcgcggaccatacctggtccactgtaatttcctcaatggcgccgggggaaaccaggttggaaatgcaccgcgcagtaatggcggagttgcgcgtccggtggcagaaaatggcggtcacgggcaccccggcataggcacacatatgtgtaggccccgtatcattgcctacacaagccagggaacgcaaagccatctggggaatatccatcagggaagacttgcccagaaaactgacagccaggggagagctggcggcaatagcctccacttccacagcctccgcccgggtgccgatgacaacggaggacacgccccgcgccgccaggcgtttcgccagggcacagaaattttccacgggccagcgcttgtagggatggttgggggaacagcccggaatcatcatcacataacgttccggaagctcgtcaaaatgcagcccctccccgtgcatgaaagaaagatccgtcagaacgcgttccaaacggaacggctcccgtaccaccttcccccaccggaaggatttcttcttcagcaatttgcgccgttctccggaattgcaggccacccagtccatgtcatggttcagcaggaagcgcacggcgggataatagcgtttcctggtgcgggaagattcctgaagatcgtacaccacatcaaaattccctttcacaatggaacggacggctctccaggtggcgcccagcttccagtaaggcaggcgattatccacaataaaatcgtcaaacactccgagctgctccgccatgggaacaaacattcccatggtcatcagggtgatatgcgcctccggatgaagttcgcggagccgcttcatcgtccccatggcgagcaccacatcgccaagggctccatgcttgatgatcagaatgcgctgtgcaggcatgggagaaaaaaggaatgcgggttaaacgtaactgtcttccctgtccagatactcctgcacgtatcggcgcacgccatcctccaaggaagtcatgggagctgcataaccggcagcgcgcagcctggaaaggtctgcctgcgtataatactgatatttccccctgagctcttcaggcatctcccggtaggcaatcttttcctggaggcccagcgcatggaatgccgccttcgccagatcgtggaaagaacgtgccttcccggaacctacgttgaacaggccgctcacctccggatgctccagcagccaaagcaccacatctacgcagtcgcccacccacacgaaatcccggagctgccatccgtcacggtagtcgggatggtaagatttgaacagcttcaccgtttcattggccttcacctgggggaatatatgggccaccacgcttttctgcccgcccttatggtattcattagggccgtacacgttgaaaaatttaagcccggcgtattgggggggaaccggacgcccttctttcacttcccgggccactttacggtcaaacagggccttgctccagccgtatgcgttcagggggcgcagcgcgttgacgtgctccagggaggcgtcatcgtcaaaccccatggaaccgtccccgtacgtggctgcggaggaggcgtaaataaaccgtttgccgtacagggaacaaaactcccacaaatgccagctcagcgtgaaattcgtccggataatcaaatcggcgtccgtctccgtggtggcggaaatggcccccatgtgaatgaccgcctccacctcatccgcatgcgccttcatataatcaagcatgccttctggagaaaccacggcgcacagctctctcttggcaatgttcctccacttgtcggaagagcccagctcgtccaccaccacaagatcctttttaccggctttttccagagcggcgacaatgtttgagccgataaacccggccccacccgtgacaataatcataagagaagaatcaatgaaaaagttgtacggccttttgtaccacatccacccgtccctaggcaactgccatttgaggcgttccccggctcccaattttcaacgaatttacaatccggacactccaaaccctgaccgttccatgcggaaaaccattggaacgcaatccccgcgcagcctgcggaggatgcgcccctcaaatcctcttttcatactggcaacgttaaaaactttcggtaagacctgtcttgcaaaaattatcattgaccacggattgtaaatccgttacacacattcccaccccctatgatccccgatgtttccatcattgttccctgctacaatgtagccgcctacgtggacagctgcctggatagcctggtacgccagactctccggaacattgaaattatctgcatcaacgacggctccacggatgagacttggatacatctgctgcgctggaaagaaaaggacagcagaatcatccttctgaaccagcggaacgcgggcgtttccgcagcaaggaatgcagggctggatgccgcccgcggcctttatgtcggctttgcggatccagacgactacatggatccggaaatgtattcccgccttttttcggcggctctggaatatgacgcagacattgtggaatgcggaaaccatgtttttgaagactcgtcagaccggcttatcgaagccaaaagaagatcaccctcccggcattttgaagagaacgcctctccggccagcttcttccgggattccatctgggggaaaatggatatctgcgtgtggagcaaactgttccggaaaagcatgctggacgcccaccgcctccgcttcaacgtacatctgaaatccggtgcagaggatgaaaccttccggctgatggccgttccccatgcctcccgtctcctgttcattcccgactgcctgtattactaccgccttatgcgcaacggctccctctcccgccgctgcaacgttcccacctactccaaatgcgtgcaggaattccagcggctgctgtacattgtggactactggcagaaacaaggatggcaaaatgaaggactgttcgcttacggtgttcggaaaatcaggcccttttttgtttccaagcatccccttttccatcaaatgaccgctgtccagcaacgttctgcgctgaacttatggaagctgttctaccagaaagcggaaggagaacgtttcctctccgcgctggcgggacgggacaggcaactggcggacctgctgaactcggcggaaccggtccccaacggctgggggcgcattctgctggcagcctgctccctgcttcccggacaaaaaggacgttattactcctgcaaaaaaatgcttgcggaacatttttcccaagtctgccccaatgggtttcaaaaagaaaacgcttctctggaagagccgtttgacacatcgccgccttccctgtaaattgccttatcctcccattccggatcaatgaaccgttttctctcatttgcagactcccgcatgtcggccgccctggagcggctgggcaggcaggcggaagcgctggatttttttgatgagatcacgctcttcacggaacacgacctttccgcagaattcaccagccgcatgggccggtacctgacgccgtcctgccggggattcggatactggtcctggaaaccctggtccatccaccatgtcctccaagaaatggaggaaggcgaccgcctcctttatctggatgcaggttgccatatcaacgccaacggaacggatcgcttccgggaatacgtaaatatgctggaccgcgacagctgcggcatgctggttttcaccaacggacagccggaatacaaatggaccaaaggagatatcttccgccacttcggcgtttcccaagaagacgggcatatcacgcatacccagcaaattgcgggcggccatgttttcctgaaaaagaacccgctcacggaaagcctgatccgggattggcttcatgtcttttacgaccatctgcatcttgcggacaacactccttccgcctcccccaacctgccgggttttgtggaaaaccggtatgaccagagcatcttttccatcctatgcaaactgaggggcatcaccaccctcgacggatcggaaacctatgcggaaaactgggaacagctctccttgtttccattccaggacagacgggacatgggaatcccacgggccgggaaaaagggatggctggaaaaatgcaggcagctccttctttcttccaaaagaaacggattaggaatccggtaaagcttccccattcggaacaaccgggctgcacgacgtttccaaacggggcaatctgacgcaccatgaactattttcccgtccttttccacagcttcatcccgagaattcctttccccttcggctgccgtttccggaatgtaatgacggttatttggacaagctcttttcatttgatcaggaatgttttgccttcatgaaagcaaacatccctccattccaaaactccgcacccgcactatcctccgccgacattctcccacccctattcacagttatgctgtcaccggaatccggctttcccccattcataccggaatgaaaataaaaaggccgtcatgctgggaacagcctgccgcagttcatggaatactggcaacctggatttccccaaaacgtttttctttcagatttgtaggcttgacggcggattcctaatcctcatactttcctatgtggcttctcctcaatgccgaacaatatttcaagtctcccatagcgtctcggccagctccgccccttaccggttgagcgacgctctgaaccggcatattcccggcctgaaatccaccctgctgctccggaggcgcaaaaaaattgacggcctggaaatccacaggacacccgccagaagggctacggacgccttgcgacgccatctggcccatggatttgacattctgctgccggaaagaagaaaagacctgcctttctccctgaacgtgctgggcatgggatttgacacggcccaaatggaaaaagccgatgtggtgcatctgcactggataggcggcagaaccgtggatttctcgcagctgcgccatatccgccgtccattggtctataccctgcacgacatgtttgcctgcaccgcgggatgtcactgcaccatggactgcagcctgttccaaaacgaatgccgcggcaactgtccccagcttggcgctccccgcctcttccgcaacattccagcgtggctgttttcccgcaaacgccgcgccttcggccgcatcccgtcccttaccctcgtaactccctccctctggttaaaaagggaagtggaaagaagctgcatgttccctggaagaaaaatcgtacagatttacaatcctgtggacacggaccttttccgtccggcggaagaccggaatgccatccgggccggcctgggcatcccgcccggagcgttcgtcatcgcctgcggcgcaaccggcctgttcaatccggtcaaaggcggccatttcatccccctggtgctggaggaactataccggcgcgggcaccggaatcttcatctcctgctcttcggcaaccaggaaaaaagcgtggactaccccttccccagcacaagcgccggattcattacggacatgaacaagctggccgggctttacagcgcggcggacattttcctgaaccccacgcttcaggatgtcctttccaacgtagcgctggaatccatggcctgcaaaaccccttccgttaccttccggacgggaggagttccggaagcggttctggacggaaggacggggctggtcgctccgcagggagacctgaaccaaatggccgcccactgcgaacggctcatccaggacggaaaactcctgcaaaccctggcggaggaaggccgccggcacgcggaacaaacattctcctaccccgtcattgccgcacggcacgccgccctgtatgaggaaacgctccgggaataccgttacgaagagtgaaaacggccggcgttcaactgacggacggcctgttcctgtacatccgggcgcatcttcctttgtcattgacaagaaaaagacgcctcatacactctgcaccgtttcaacccttctctccccatgaaaacgcttaaaatctcctttttacagtccactccggatttcggcagggaaggaatgcttcagcttctgaaaagccggtatcatgtggtggaagacgattccgattttgattacctggtcgccaccccctggttttacgtcaaccgggaggctttttacgattttctggaacggacccccggccacatcaccgtcatgtacggctgtcatgaagccattgcgccggatttcatgctgtttgactattacatcgggctcgatacggtgcccggaagcgaccgcactgtcaaacttccctaccttcgccaccatttgcaggaagtgcacggcggaaaggaaggcctggatgcccatgctctcctggcctccaaaacgggtttctgcaacttcatttacgccaaccgcaaatcccatcccaaccgggatgccatgttccacaagctctccgctttccggttcgtcaattccctggggccccatcttaacaacaccccgggcgacggccaccgggcggaagactggtacgcatcctccatcagaatgaaaaagccgtataaattctccattgcctttgaaaatgcatggtaccccggctacaccagtgaaaaaatcgtcaccagcatgcttgcgggcaccattcccatttactggggaaatccggacatcagccgggaattcaattccgcctcattcatcaactgccacgacttcccaaccctggacgccgccgcggcctatgtgcaaaaagtggacgaagacgatagcctgtggtgtgaaatcatgtcgcgcccctggaaaaccccggaacaggaagcccgctttctggaagagacggaaagggaaacagccaagctttacaaaatattcgaccaatctccggaagaagcgcgccgcaaaggtgacggaacatgggtatcctactaccagcgctttttaaaacgcggccacaggatgcagctggcatggcggcggctgaaaaaccgcctgcgccgctgaccggaatttccgggcaaattcaaccccatgccggttttcctccatccgccttcccccactcccatctaccctctctccgcttcatgagcaaatgcttttctgaaaccttttgttcaccttctccccaccaagccggagacgccatccacggaacctatttcccgcacattgacggcttgcgtacctttgccgtgctggccgtcgtcctgtaccatttgcaggaagggatctgtccggggggctatacaggcgtggacatcttctttgtcatctccggatatctgattggcggaggccttatccgcggcctgaaagaggggaccttctccctgacctccttttacctccggagaatcaggcgcatcatgcccgcctacttctgtctgattgcggttgtgctggccttcggctgcgtcgtgctggactgcgatgacctgcggactctgggccggacggtgagatccagcgcccttttcatcaccaacatttatttcagcagaaccacaggggattacttcagcccggcggcagaagaaaaccctttgctgaacctgtggtccctgagcgtggaagagcaattttacctgatgattccactcaccctgtggctgctctggaaattcagggaaaaagccgtcaagcccgttctatggggggcgctgggcctctccttcttcgccgccgtctgccacatggggcatctggaacataacaaggccttctacctgctttactgccgcgcctgggaactcctggccggctgtcttctggccctcgcccccgccgcaggacaaaaccggggcgccggatggctgcgggcggcgggatgggccggcatcctgctcccatttgcctgctatacgccttccactccttttcccggatacacggccatcccttccgtcgcgggggcggctttgcttatccgttacgggaaccatggctggtccgggcgtatcctcaggcacccgctcagcacaggcatcggcaaaatctcctactccctgtacctgtggcattggccggttatcgtgtactggacgtacatctgcttcgacgaatgcgctccctgggattatgcgggaatgttccttctctcccttcttctgggtttcctctcctggaaattcgtggaaactcccttcaggacgaccgtctcatggcaaaatccccaaaaagcgtttctggccacggcagcagggtgcctcatgctgggacttgccggcgaatggctcaaatggacggacggcgcgcgggattactggcatgtagcggccaacaacatggaattccctgaatactggaaagggccggccttccctccctccttcggcatcacgcctcccgaccaggcggtagtggaaaagggaaacgccatccagcaccatcatccggagctgggggatgtgacggattacccctttgtcctgctgggaaaaaccgggcaggccccttccttcctgcttatgggggacagtcatgccatggccagttcccccgggtttgacgaggccgcccggcttcttcagcgttcgggcctgttctaccgcgcgcgcctgtgtccgctgagcggcatttccagctccggagactcctcttccctaacgctcctgcgcctgatgtacccccattgggaacacaatatggaactaatcctggactggctggaaaataccccccaggtacagaccgtattcatccacaaccgctggattgaactggtcaacaaccaccgggatacgcgcctgaaacaactggttgcagacggcctgcgccacacctgcgcgcgccttcggaaagccggcaagcaaatcgtgctgctgggccccgttcccgaatggactttcggcccgcgcaagctcatgcgccgcaatgccctgctgaacgccaaccggacagaccgcctgctgggcggagatttcaacacgcggcagcgtccggtattcgccctgttggagcacatggaatccacaggcctgtgccgcttcattcccctccacggcaccttccataaaaatgggcggtggcaggcggaagacggcggccaattaatgtactgcgacgataaccatctttccccctatggggcaaaaaaaatggtcggcggcatcatcgaccagcttttcccgggaatggaaagaacagcagccaactgacggaagtaccgcacggaaaaacatccaatcctttgacattgacaaggcatgcaggccccctacactggcgccaggcagcaaagccttcgcgatggtcccggataaaagcccggaatatggaggccataccgcgcccccctcttcaacgcctgtactcccatgacggattccccccgccccacacgcatcaaggtcatcagaaaatccatgaaggcctctccggatcaaacggaatccctgttgtggggcgactgcctgttctgcacggacgccgccatgacggattacgactgggttctggtatacgacgaatttcccagaactcccgtgggcaccatcaggaatgaaacggaaccccttctctgccctccggaccagactatcctgattacggtggagcccccttccatcaaaatctacagcagggcatacaccagccaattcggcaccgttctcaccacccactccgcccgggaccttccgcaccccgggcacaccctgggccgcggatgtcttgaatggctgtacatcaagcctatgcaggaaattctggaccagaaggaattcccgaagacaaaaatgctctccaccatctgctccgccaagcagcatacgcataccatgcataaaaagcgctatgatcttacgcgttacctggcggaccgtctgccggaactggactggttcggacacggcatccgggaaatagaaaataaaaccgtcgccatggatgactacaaatatcatctatgcgtggaaaaccatctggaaccccaccattggacggaaaaactgtctgatgcctttgtcgccatgacccttcccttttacgccggggatccgttggcaacggaatgcttcccgcaggaaagcttcatccccatcccgctggacaacccgcaaaaagcccttgaaatcatccgcaaggccatggaggacggagaatatgaaaaacggctccccgccatccgtgaggcaaggcgcctggtgctggaaaaatacaacatgttcgctcaaacagcggcagtcattcacaaccacagggaaacgggaaccatacggcccggagccatgctgaaaggacgtcacgtcctgcggaaaaatccgctcaatgcccttcgggaattggcagacaccctggcctataaaatcagatcgttcggcagacgcggaaccggccccggcgtgtaacctggattccgggcgcgtgccaacaggagggaacaaattccccctgccggtaaaaaaaatgggcggccaatattccgccaactgccttgcggcagacggaacggcccagcccggtctgaaaccgattcaaaccggacgggaaacaggccattaaaacggaaaaaacttaatccgctttgcgggaagcgtgcctcttggcccgttcctcctcccgctgcttcttcaggtcttccttcatcttggccttctcttcggaatccagctttccatccttgttaatatcatatttttcaaggagagcggctttcttctccgcagaagtcattctcttgggagcgtcttcctccgccatggaaggcatggcgaacgcaacggccagaacaataagcaaatacttcatgattaaacggggttcttgaataatccttttctactcccgtacgtgccggttgtctctctttttttagcaatacatgcaaattccccggccatgccccttttccgccgcatgaactcccaccggtcaagccttcccgaacgggaaaaacagcggaatcaccacgaccatgaccagccccataatcacctgcaggggaacgcccactttcacgtaatccatgaacgtatatttccccgccggcatgaccaaggcattgggcggcgtggaaaagggagaggcaaaacacatgctggtgcctacggaaaccgccagcagcagcggataggggctgatgcccatactcgccgcggattgcagggcgataggcgccagaagcaccgccgtagccgtattgctgataaacatggtcagcagggacgccgtgaaatagacgcccgccatcagggcaaacggcccgaatccccccagtccggccaccagcccgtgggaaatggcctctgaggctcccgtcttctccagcgctacggacatcggcagcatggcggcaatcaacacgatgctctcccagttgatcgtccggtacgcctcctccacattgcgcagacagccgcacaacaccatcaggacggcggcaatcaataccgccgccacagcaggcacccagttgaacaccatggccgcaatcatcagcagcataatgcctgcggccaggggggccttatgcgtcagggtcaccttggaggcctccgccagaggctggcccactacaacccattcaaaggttttctcactcaggcgcgcaatatccgtccaggttccctgaaccagcagcgtatctccgtactggagcttcacatccttcaaattatggaaaatgtaatggttgtctcgctggatggccagaatattgaccccgtacttggcgcgcagccccgaagatttcacgggcatgttgataaggtccgagttccgcatgagcagcatttccgcaatgcctatctcgtcaaacttcaatttgcttttcaacagggaatccgtatcttccgacgtcttccggttaatcatctccgccccatattcccgggcaaaacgggccacgtcctcaaactctcccattacataaatgacgtcgccccgggccaccctcgtatctgaacccgccatagtctggctgaccgtctgcaggaaggaatgccggccggaatgcctgcggcgcacctccacaatattcacgcggtaaaggtccggtatctgaagatcatgcagaggatgttccgtcagaggggaatccttcaacacccggaggcggtaaagattattaataatctggtactcatctatcaactggctgagggatttccccttggcctcgtgttccgccctgtcgtcatgacgtcccagaaatttcctgctgagggggatcagcaccagaatgcccgtcacgatgcagacaaggccgatgggggtgaacgcaaaaaagcccagcccctccattccggcctcctgaagctggttgttgacgacaaggttggggggcgtgccgatcagcgtcagcatgccgcccatactgctggcaaatgccatgggcatgagcaggcggctcgtctgaatgcctccgtccgcagccaggctcaccagaataggcagcatcagcgccaccgtccccgtattgctgacaaaggcgcctatgccagctgtaacaagcatggtcagcaccagcaggcgcaactcgctcctgccggccagtttcatgattctgccgcccatcattttggccaggcccgtccggaaaatggcgcctcccaccacgaaaagccccaccatcatcaccacaatggaattggaaaagccggaaagcgcctgttccgggctcaaaatcccgaacatcatcaggcagagcagggaacacagcgcgacaagatcagaacgaatcctcccctggacaaataaaacggcggatacacccagaatgagaagcgtggtcaacatagcaaaaacggcaggagtgaaaaaatggcaagggaggatatctaacatgaccggcatgtcttgtcgataggctgaacaagtcattcacaaaaccgtctctccgccggcatccggcagaaaaaaacactttgtgcatcctgctcggagaaccccgcttcctctttcctttcccggtatcatggggatgatgaaacaataaaaaacgcgctctctgaaagaacgcgccataaaatgaaaagtggtgggtagagaaggattcgaaccttcgaaagcaaatgctaacagatttacagtctgccccctttgaccgctcgggaatctacccacttgaagtgatgtgcggcgaatgtataaggattcccgtgccttagcaagttttttttctaaaaagtaggtcctcccggaagcagaacccctatatgcaacagccatgccgccggaaggaaagcggatgcaggaacaaaaagtcggaaaaggcaatttttacgaatctcccacatataccggagcgcggctgtccggggaatccgcatccagttgctccagttggggcagaatgttctccatgctctcccatacggagggaacaatcttgattgcggttccaaaccggactgccatcatcagggcgtctgaagggcgggcgtccagctccaccagcttgtccatcacctcattggcagcctctatggtcacgcgggcataaaagacttcatccttgcggccgttgataagcaccagcctcacccggcattccatggcggataaaaagtgagccagcagggaagacgtgtccggccgtaccgggcgttccccgttcaggcagcgttccagggccatgccgtctgtcagctccatgaaaatgacgcccaccttgccggtcagcggatcacgcaggcacacacccgccccggcccgggtgtaaagcagggcgtaaggttccagagtaatcaaatgttcatccggcatggcgggcggaaatcacatgttaaaaaccgggattaataacccgttccgtatagcgggcagccaccttgacgtatttttccgcccatttgtggttattatccgcggattccggccccaggtccttcaccaccttggcaggagaacccagcaccagggaattgggaggaatgacggtacctttggtaatgagcgcgcccgctcccaccacagacccctggccgatgaccgctccatccagaataatggaccccattcctatcaggcaattatcctccaccgtgcaggcgtgcagaatcacgccgtgccccacggttacgtacttgcctacatagcagccgaaatcgtctgccaggtggatgcagctgttgtcctggatattggagtaatcaccaatgacgatcttattgatatctgcgcgcagcgtggtatggtaccagacgctggcatgttccccaatggtaacatctccaatcagatcagcgctttccgccacaaaagcggtatccgccactttgggccagaagttcgcgtaaggttctcttgccatataagtcatgtattaattgaagataagacagcattccagtctaaaaacgttcattccgcgggtatgccgcagccggaaacgaatacggccgaaccctcccgaaaatgaaaggccgcaggcacctccgcactaattttcttcccggatgcccttcttgctgttcttctcccgcttctccgcatccttgcgcagggagtcggcttttttcccattaccccccttttcataatacccggctatcctccgctggatggcggcttctttttttaccttgaaataatcgcccgatttagtccggatataccggttgtaggaagactccgcctccttggccagctgaagcacggcctcctgatcctgggaaacgtactcgtaatattgccccatcagcgcttcaaatacttccgcgcggcgagcataatccttcatggacttccggtacagggcagccaccccggccttgtccccgttttccatcaggagatccgcctgccgtttgatggcggcggaagtcaggtcgctgcgcccctcgtccgtctccttttccagcttcttcaaatcgcgggcaacatggcgcttattggtggaagcgtccctcatggggaaaatatactcatcttccacgcgggcggccatggccaggtaatccggacgggaacggaacttgcgcttaatcatggccaccagttcatcccattcttccagcttcgtgccgctctccgggcgtcccatcagcgcaatcaggcgttcccagcccaaggggctgccgggagtggcctgtgtggcggcttccagcattacccgggcgcaatccggcttctgcatctcctcaaacaggtccgccagggaaagataatccagggaagtatccagccgggcgccattcaccttcttgtccataccctggagaagggtggattcatgctttgacttgcagttgtgcggatgggaaaaatgccccgtattatatccgtacccgccgtaggactgccaggtttcatccgtcgtcagcagattgacccaggcatgcggcccgcggttgccgtccccggtaacataggcggagggaatgccgttgcatttggcggtattcaccgcaaaataggcctggtccatgcaaatgccgccttcatccagaatctcctggaaggtataattagtataagggtccttgcccagtgcggcgcggtccatccggtaacggatcatggaataggctccgccccatcctttccgggtaaggcgcacctttttgcgcgcccaatccatctccgaccgcggcagacgcacatccaccacaaacaacagctcggaagggcttaatttggaaatgtccgtgagaagctcacgggcttcatccatctccatgaagtactcgaatacctgttccagcgtcaaaggcgtggtggaaatattggtggaagaagacgccctcagcttggacgggctggaagcgatgcggggattcagcatggcgcaggccagcgccagggaggaatacctgctccggggcatggcggaggttttcatccagaattccgcccacttcctcaaaatccctccccactcctccccgggtgtctgctcccgcgccatcgtgcgcaggaaaagtctcaggggatcggaagggtctgaaaaaagccatggatagaaatacctgggggaactctccttgatttgttcctggatagtttccgctcccactttgctgatgagctggtacagttcattggcgcgcacgaggtacgggctctgatcgtacatggacgcgtcaaatttaccgaatttgatgaccttcacggcatcccgttccagattggagcgcaggaaatcggcatacaagtcatagcggcccgtttccagggccagattgaaagcatccgtaaacaactttctgttggcggcgttattggccttcaggctgaccagaagaacaggcttcttgaaaatctccagccgcggatcttcctcctggaccacgggttcttccttcggttcctcaggggaaggctccgccacttccggttccttgttctgccgttttccggcggcttcctcagcagccaggcgttccgcctcaagacgggctttttcctccgcctcctcgcgcgcccgttcctccgccttcctgcgcgccgcctccagttccgcggctttccgcgcacgcgccgctttcgcttccgcctcctttctggccgccagctcagcggcagcagccttacgttgaacggaaacccggtggtaagccacccctccggcggcaagagccagcaccaggacaatagtcataataattccgccggaagaggattttttatgcttgggaaaaccgggacgcagaggattgacaggattcatggggatgcagcttgaacgcgttgaagcaaattggggtgggggatgagacggttttatccctgttccgtgtgacataaaagcgcaatacctttccgaggtcaacttgaaacaatggtcttttgctgaaggttcgttttcccggaacccgttaagaatcaaaccagagtatttttccttgtattttcatagccattttatagtatcaggcctcttcatgtttccaaaaacatgagaaaaacacaagtatcctgctgattattcctggctgacatatgtttttcccgttgcctatgaacactttctctcatctcagtccgtttctggccgtcatttcgggaatcctcttctccggaacggctctctgtaacgacatcgtgctgcctccgccagataaaaagggaggaaagcccctcatgcaggttcttcatgaacggcattccaccaggtcctttgcagacaaacctatcccggtggaaatcctgtcctccctgctctgggcggcgcaaggcgtcaaccgggacgatcccgactaccgcacggcgccgtcttcccggaattccaatgaaatagaaatctatgtcgtcctgccgcagggcgcctatctttacaggccggaaacccaccggctggagaaagtggttcagggcgacatgcgggccgctacgggaacacaggaattcgcggctaccgcgccgttaaacctggtctatgtagtagaccagtccaaacagccgggagactttgatgccaggagaaagctggtcacggcctgcacggatgcggggtttattggagaaaacgtttaccttttctgtgcttccgaagggctcggcaccgtgttccgcgccatgattaacgccaattatatccagcagtgcctgaagctccccgtcctcaaaaaagtcctgtacgcccagagtgtcggctatccgtcaaaatcctgaaaaaaccataagccggaacgctgtgagactcgccgttccatcggcggctcttcctcatgccctgcgaaaaaccgtcatgggaaccgccgttcccatggaaataaaaacgccaggaaccattgccgggccagtcaggagcgcactcttccggacagcccggcaacaatagaaaaagcgtttggcgaactgttggatgaacgtttcgggcaagcccggttccgccactccgccctgcggcattggctggagaaatgttcaaaccggaattcccgggaaactgcggcgccaggaaatctactccccgcttgcggtctttcccatagttcaaattcatggaaaatccggaaccgcaagcggaaaacgcaccagcattaccactggttgtccaggtttttggtatttatctttccgggttccttgttgcgttccttcatgccgcggacaggcttgggctccttttcgtgcaggtccagaatatcaatcacattctccccttttttcaggaatggggccgggacatacagccttaactgaggtcccacattccaatagcgccccacgttgattccgttcacccatacataccccttgacatagcgggacatatccagaaacgtgtcctgaggctcttcaatatttacaacggcccggaaatgcgccccttcccgtttctgggaaggcccctttcctttgggagcccgcacaatggaatcagctttcaggggaagcgccctcaccgtccagttctttaactcccgcgttcccagtttcacaggaccgtaaatccccttgcggtcactctccatgctgatatgaaaattaatatgccccatggcctctaccagaacttccagcgtccccggcttcctgcgctccggcagtttcacgctcttctgccccagccgccgatccagcgtgccgaccagctctccatccagatacacctgggcatagtcattgacattggtaaattccagcgtttcaggcggtcctgacggaacggccgtgctgtaaacggcaataccctggttctggttccattgttcaaaatagggaggctgcgggaacttggaccggaaaggcttgggcaggttctcccaaaggccggcatgcactgcgggcgtaaactccggaatttccatggccggaatgtccgcgggaggttccggcacagcggcttcgggaggcaactttttcaaaatgatgtccctcatctgggcataatattcattcatccgcccctgctcatccacgggagaaccgtaatcataactcgtcaggtccggctggtattttcccggccctccgttgttggctccggccgagaatccgaaattggtgcctccgtggaaaacgaacaagctgaaggaacgccccttgtccataaaccagcggacgtggttgaccactccaggggtgggagcccaattcccctccccccagtgccgcagccagcccggatacgtttccgaggaaaaaacgggaactcccggattgcatttattagccactgcccaatggccgtcgttcagccccggatccagccctacggccacgcctggaagcaccacgcctttcagaaaatgttctcccgcgccgtcggaggtgtaaaaggggccaaaacccttcctgctccagaacgccttcagccattccatatacttgcggtctttacgctggtagctcccgtattcgttttcaagctgggtcatcagaatgggccccccgtttttggctaaaaaaggctccgccacacgagccacggcctccagataacgcgtctgcgccttcatgaatttggcgtcttccgtagttctcaacttggccttgggatccttcagcaaataatgaggcagtccacccaggtcccattccccgcatgcataggggccggggcggaataaaacccacatgccttcctcctggcataacttgaggaacccttccagatcccgattgcccgtcttaaagtcaaagctgccgtccggctgctcatggtcattccagaacacataaaatgcaatagtattcagccccatagccttggcggtcctgatgcggtgcctccagtattcccggggaatgcgctggggatgcatctccgcgccgcggatctggaagggtttcccgttcagcatgaactcctggttcccttcccctccgaacccgaacacaacgggggttcctccggaaagagcgggtttctgtacattctggacagcctcagggccagcccatgccaatgctcccactccgacggccatcagtgcggcagaccaactgaaaccatattgcttcatcatgttgaacagttaattcatttgaagacggttgccaataacaatttttttctctcttctccgaatcttcggaatacccttcccctccgccagaaatctgacggggccggacggaacggaggccttccgttccgtggaatgtgatcatgtcatatatcttcatccctttgtatgaaaaccggaggacgcctgtctaaattgatcaatatgaaaacaattgttcttcttcgccatggagaaagcacgtggaaccgtgaaaacagattcaccggatggacggacgtggatctgacggaattgggaatacaggaagccaaccatgcgggcgaccttctgaaagacaggggaatggcctttgaccatgcctacacctcttatctcaagagggccgtgaaaacgctcaactgcgtgctggaccgtttggaccaggactggctgcccgtctccaaaagctggaggttgaatgaaaagcactacggcatgctccagggcctgaataaaagtgaaacggctcaaaaatacggagacgaacaggtactgatctggaggcgcagttatgacgtggcgcctcctcccctggcggaggacgatcccgccaaccccaaatgggatccccgctacaagggagtgccggacagcgaacttccgcgaacggaatcactgaaagaaactattgcccgcatgatgccctactgggaaggaacagttctcccttctctacggacgctggacaatatcctgatcgtagcccacggcaacacattgcggggcatgatcaagtatttgaaaaacattcctgacgaacagctgctttccctgaatcttcctaccgccaccccctatgtatttgaatttgacgactccctgaacctggaaaaagactactttcttggggatccggaagaaatccgcaaacgcatggcggccgtcgccggccagggaagcgcaaagaaaaaaacgcctgcggaataacctcactatcctttcctatgaccgtccattcctgccgcattgcgttctttgacgccaagccctacgaccgggattccttcaattctgtcaatgaacgcgaattccattacgacatccgttacttcaaggggcacctcactccggacagcgtgcccctgacccgcggtacggacgtagcgtgcattttcgtcaatgacacggcaaaccgggaagtaatacggaacctgaaggaaaatggcgtcaaattgctggctctgcgttgcgccggattcaataatgtggatctgaaagctgcggaagaagcggaactgcccgtcgtgcgggtgccccaatattctccctatgcggtggcggaacatgccgtagccctgatgctttccctgaaccgcaaaatacaccgcgcctactggcgcaccagggacggcaatttttctcttcacggcctgatgggctttgacatgaatggaaaaacggccggcatcatcggaacgggaaaaatcgccagaatcctcatccgcattctcaaaggtttcgggatgaacatcctggcctatgacctgcaccctgaccagcgctttgcggaagaagccggcattacgtacaccaccctggacgatctgtacgcccggtccgatatcatctccctgcactgtccccttactccggaaacggaacacctgattaatacggattccattggaaaaatgaaggatggagtgatgatcatcaacacgggacgcggcaagctgattaacacggaaatgctgattgacggcctgaaatcaaaaaaagtgggagctgccggactggacgtgtacgaagaagagggagaatatttctacgaagacaaatccgacaggattattgatgacgatactctggcccgtcttctttccttcaacaacgtcatcctgacttcccaccagggctttttcacgaaagaagccctgcacaatattgcggaagtcaccctgcacaacatccgggactttctggaaagcaaacctctgatcaaccgagtctcgcttcagtcacgctgaacgtgcccggcgggcgctctacggaaatccgggactttctcatccgccttctgccggacagaaggcggaattcggggaaaggcggcagcttttttatgcaagcgccgccacttcccgccgtattatatactatgagcactccagcccctgcctccgtcctggctcccaaaccgcactacgccgctctggacggcctccgcggagtggccgccgtcatggtggtcctgttccacatgtttgaaggcagcgccagggacttccagttccacatggaccagatcatcaaccacggctacctgtccgtggacttcttcttcatgctgtccggcttcgtcatcggatacgcctatgacgaccgctgggaaaaaatgaacctgtggaacttctgcaagcggcggctggtgcgccttcaacccatggtggtcatggggatgctgctggggggaatcctcttttacttccaggggtctgaaatcttcccgaaccttgcgcaaacccccgtatggaaaatgctgctggtcatgaccgtgggattcacgctgctgcccgttcccgtttccctggatgtgcgcggatggtcggaaatgcacccgctgaacggtccggcctggtccctcttcttcgaatacgtcgccaatatcctttacgccgtgctcatcagaaagtttaccagcagatggctggcggtcctggtctttctggcgggctgcgccctcattcaccagtgctacacgcagggcaacaatatcggcggctggactctggatgcggaacagtgccgtgtggggcttacacggctcatgttccctttcttcggcggtctgctcctgttccgtctgtgcaaacctggacggatcaggcatggtttctggtggtgcagcctgcttctggcgggagccctggcggcaccccatgtaggaggcgcggaaaatttccgcctgaacggcctgtatgacgccttctgcatcattgtcatctttcccgcggtagtcttcctcggagccagcgacatccctggagacatctcttccagagccagtcggtttttgggaaacatctcctatcccctttatatcacccactatcccatcgtatatctctacctggcctgggtccacgatgcggaagtccctctttcccgtgcgctccccgtggcggcaggcgtcttattcctctgcattgccgtagcctacgggtgcctgaagctttatgacgagcccgtgcgcgcatggctttccaaacgcgtgctgaagcggcgccctccggaacccggggcgtaaagcggaacaaacatctgccttgccccgggcggggccaggccggatactgacggcggtctttcatggaaaaactgccgacatcctccaaagccctgcgctacctgccctttcttgtggcatcggcattctttatgcagatgctggatgccaccatcctgaacacggccattcccaccattgcccgcagcttcaacagccatccgctgcagctccactccctggtaacggcctacatgctcaccgtctgcgtcctgataccggcctccggatggatatctgacaaactgggttcccgtcgtactttcctgctggccatctccattttttccgtgggctccctgctgtgcgccctttccgcctccattaccatgatgacggtatgccgcgtcatccagggaataggcggcgcctttctgatgcccgtcgggcgccttgtcatcctgcgctcctatccccgctccatgttcgtcaatgtcctgaacattgtaacgattccggcgctgctgggcccccttctggggccggtgctgggcggtatcatcgtacagtacgcttcctggcactagatattcctgatcaacatcccggtaggcatggcgggcctgtgggccacctggaagctgatgccggacctgaaagcggtccgggaacagaaattcgactggccgggtttcttccttttctcctcctccgctgtcctggctacgatgggcctctcttccgcgggaggcataaccgataagccgcgcatggtcatcctcacgtctgccggaggcattcttcaacttctgtactgggttctggcgttccgttcaaaagcccccatcttcagcccggccctgttccgcatcagaaactttgccatcggaatcgccggcaacatcgtctgccgcctgggcggaagctgcctgccgtacctgatgccgcttttcttccaggtggtgcttggttattccgctcttcagtccggcatgtccctgattccgctggccctgagcaacttgctggcaaaaacggttgcgccgcgtctgctcgggaaatttggttaccggaacatcatggtcgtcaataccttcaccataggagcgctgctggcctccttccactttgtaggccctggaacccatgaatttactctcctgggcatgctcgcgctactgggcggggccaactccatccagttcacctgcatgaacaccctgacactgattgaccttcccaacgcagacgccagcagcgggaactccctgctttccacgatcatgcagctctccattgctgtcagtattgccgcggcctccctgctgctggacaacttcggcggccattcggctacctccggaaaggctgtggaaaccgcctttcatgccactttcgccaccatcggcgccattgccgcggccagttccttcatcttcgccctggtggacaaagacaagggaatcacccgcaaacggagaaaagcagcttgaagaggaaaatccccgcccctgttcaggaacaggaagaggaatctcccgtctcaagagaacaacactgcgcaaaccgggcgcgggactcttccagggtaatcggtttcttatcctcccccagagctacataaaccagctccgcctctgtaatcttggcaatgttattgcaaagcttcgtcagacgttccgcatacacctccaccttcacggtgacggaggtgcggcccaccttgataatatccgtataaaaggacactacatcgcccaccagcacaggagcttcaaacgtcaggctgctcaccgcacgcgtcacaatataacggctcaatgcatagcgcatggcggtattggcgcccgcaaggtctacctggctcatcacccagccgccgaatacttccccgctctgattggtatccgcaggcattggttccacgcgcagggcgggaacgcgcccttccggaagctgggcatgacgatatgtattttccataaataagaataattataaattaataaggacatgcttatctatcacagcccccttgtaaagggtaaaacgcggaagcggaaaacgggcggcgccggcacgctctgcgggaaaaagaaaacagcccggaataaactgctttcccatattgattaagttgggcaggcggatttccgtgtcttatcccggagtttttccaccatggccggtaaaggcggttgtccattactcatggaccgcaaccatgaatccaaaacgaaaaaagtggacggggaggcacatcccgcttccgactttgcctacgttcccgatccggaaaagccttccacctggaaactgccgattttcaacatgcgccacgtaggaggggccctggccgccatgaccagcgactatcgcggcaaccccgtggaaataccggaaggagatcgccgtgccgtcatgaaaaaaatcctggccaggaaagcgaaactggaacaggaggaaagctgattccgttttctttcatttcttttttccgcctgtaaacaggaaggaaagaaatatcttttcccttcattccccggtcttagccgtttgaggacgggctggcaccatccagataccggccttctgcggcacttccggctggcacccccgtagaaataaaagacattcccacccttccgacgctcctggcggatacagccggatactttatttacggacggcatcaagaacggcggtaaaacagaagaagaaattaaattattctaaaatcatcaatcatcccaaggatgtttttcccctaacgtcgattggggaaattcaggaaatctgaaaatcaagtaactttttccggccaataaaaacaacatttagaaaattcatatataaataaatatcaatggcatattgaaataaaaacatgtctttccctgaacaggccgtccaaaacccggtcatcacgataggaatgaagaatgccgggaaaaagaatgctgccggctatttcccgcatggcagcgcttttccccttccgtcaactccgcatcaaaatatgactgacgaaaaaatgagcacagaaggcactgacgaaatacagaacccgcgcgatgaattccaacaggaaagatatgaaaagcagcagcagaaagcccccggactgcaatccggaatgaagcccgtgccggattccggggaacaaagctaccatggctgcaacaggctccgcggacgaaaagccctggtcacagggggagactcgggaataggtcgggcggcggctattgcctacgcacgtgaaggagccgacgtagccttgaactaccttcctgaagaacaaagcgatgccgaagaagtggcggaactcatcagaaaggagggccggaaggccgtcctgctgccgggggacctcagcgatgaagtcttttgtaaaaaactcgtcagggatgccttggaaaaacttggcggactggacatcatggccctggtagccggcaaacaagtggcggtggaagatatccgggacattaccacggaacaattaaccaagacatttgaagtaaacgtgttctccctgttctggattgtcaaggaagcccttccgcatctcaagccggggacgagcatcattacctgctcctccgttcaggcctaccagcccggcaagaacctagtggactatgcttccacaaaagcggccatcatcgcgttcagccgctccctggccaagcaggttgcccccaaaggcatccgggtcaacgtggtggctcccggccccatctggacagctctgcaagtaaccggaggccagctgcagaaggacctgccggaattcggacggaaaacgcccctcaaaagggcagggcaacctgtggagctctccggactatacgtctttctcgcctcccaggaatccagcttcattactgcggaggtctttggcgttaccggcggcatgcatctggcctgatgcggaaacccgcaatccgggaaaagggccggactgactttccggaatccctttccgcagctccatacctccggatggccgggaaagcggccggaaacggccctgcaaagaaatcagggcattgctccatttcccggttgtcccggcaaaaggttcctgcttgaatagggtaatggcattttggaggttttggttcatctctttccctttcacggcgcttctcttttccatggtgcatggcagtcctctgaacgcacccgtcatcacccttggagagaaaaaaagcctgttcggagaaaaagcgcaggtcaatgaatatgtcagctatgccctttattactggccggatcccgccaatccggacggtccttacaaacctattgacggcaaaaagaacaaacggctccgcagcatggacgacagcggcaggatggccgctttcatcggcacggtctgcagcctgggacggcaatatgaactcggcaggaatccgcaagccgcctcccgggccgggcaatggctgaaagcctggttcattgctccggcaacccgcatgcagccccatctgaaatatgcccaaattcgccccggacaccggacggaaggagacggaggaggcatcatcgacctttaccgcatgcccgaattcctggaagctttggcggtgttgaaatgctccaatgccctaacggcagaagaatggaagcaggtggacacgtggctgaaccagtattacacatggctgactaccagcaggcagggcaggcatgcgcacacgcgcagcaacaaccattatctgttttatgtggcgcaatgcgcccatttggcatccttcctgggccgcagccatgaagcggcccaatggctggcggaagccttcgccaacatggaccgccacatcgctcccgacggctcccagcctgaagaactcaaacgggcggaaccctggcaatacagcgtttacactcttcaggcatggggatacctggtgcatcttgcagaacgcatgggcgataagaactaccgttaccggaaaacccccgccggggcttccattcaaaaagctgtggactatctcctgccttaccgctccgctcctgaaacatggccctggcagggctccagggcaaacactccgctccccgccatctttgaaccggagcaggagggcaggccacaacggaaatgctcctgaaccgcgcccgccgtcaaaagcatccatttttcctgcttattgaaaatcccctgtccagcagcatcacgaacggggtattttcccggaaaacgatttaataagaaatctccccagtgttctttcccttagattttccctttctttttgctgctttccattcccacggagatatgggattcgggtcagaccagatgcctttttgggcctttctggcatccctttcaagagaaacgagtttccggctggcggaaaaatttttataaatccacgcccatccttccttcaccatctcttcgttgacaaacatttttccatgccatatctcccctaaaatacggccgtacctgtcattctcggtataccggactgtaaccgtctctccccaaatcagcttttccaggtatttcttggcgccttcatacccgtcctgccccctttccggcgtatcaattccctcaagccgtatccggtgcgtacgcatttgttcaggcgtcttttccagaaggatgaccgtgtcgccgtcaatcacgttaatcacgactcccctgatactttcagcaaaagccatgcagggacttatcaggaaaatcaaaagccatttcatgaaaaatgatataatccaaaaaatatcaggatgcaactactctttagagaaaccgttcccgcactgttcacacggccggaaacagatgaatgcggtcatctgtggacagcctgttctggaacaggccatcatgttttccggcatgaaggaacacaattcccgaacctattccaacctgtccggaacaacggtaaacaggctgtatcattgccccgctccggaacatctttattcgctgccgtgccgggagcggaagaacatcccgccggcgcacccaacaatccaatcatgctgccatttagaaaagctgcatgttaaacaagaagaaccgggcgccctgcaacattcaatggcatggcgtgaggcatttcactcattttttcaattcttcggctattctgccgaggttcttttccgttgcctttctcagtttctcctgctgtttccagtaccatgccgttctttccgacaccccggcctgattcgccagccagcgcacggcgccgctcgtgtcacagcctgttttcttctgaatgacttccagcagttgagcgacatatttattcatggattccgggttgatattatttcgattcccatgcccggctgaattcctcgtcccggaacagggaggcaatcccgctgagctgcttgaggcgcaacaattcttccgcgtccatccccagatttttgagtatccacgcatccgacatgcccgcctccgtcaactcctggataatattggtcatgagggcgatattatgagatccccgggcacggttgtgcctgatggtggaagccatgcggtttccaagaggcttgtcgattacggccaccggcatcatgccaccctcccgttcgtaaatatcgcggtaagtcttcatgatctggcagcggtggaacccgtccacgatttcataggtcccgtcctccagcttataacaaacgataggcatcgtataaccgtcctccttgatgctctggtagagcagcttcatttcggggggagctacgctgttcgggttataggcattggaacgtatctggtccaggggaacgcgccggattttgtaaacgggggattgataggaggttttcataaaatattgcggtatttattgacggcggcccggcgccgggcaatcgctcccttggttggaccgaacccggcgtacttgcaaaagtaatcattcttcatgatgcagatgcacatgcgcttgtaggaaggcacctgccggaaattgctgaccggcatgtcgtcgggatagcccataaactgaatgacgtcgcggtcgacgtaacggcccgactttcccgtcacggtcgccagaggataggcggccagcacttcatcggcagttccgggatcgacggtgccccctttcatccagtactttttagacctctccaaaatgttgttgtagtgttccgccgttttctcgttcattgtggaaagcaggaattcataataggacttccaggtatggccgggcggcagtttgatggttttccagcccatggccgtcgtacctccgtacaaacccgtgaagttgacgccgttgacgcgcccgaccatgcgcgcccagttggcaggatcaataactttgtaaagcttcaggctttcctgggcgcagtcattaaacgggcttgccacccgcatttgcccgatcgtaaggcctgcctggtacaggaggtcgtaaaggcggttatagtcaaaaccaaaacgggcgttggccgtccagacgtcactgacgcgccagtcataaagagggtaggcgctgacggtcacggcatcagcccgtgtaatccacttccttccctcataagacgtccttttattgccgcgggcaacggcggcgtatctgttgaggctttcatccgcccgcagccctaccatgacggcagtgcttccgtgttttttggcaaaatggcgtgaaagcttatcctggaattcatagtccaccataccgtgccggaacgggacgtccagattcttttcgttgattacatagggattttccggcatgggtcgcacccacagttttttctgggcggcgctccacggcgtccagtaaggttcccccagggagcatgcggactgggccctgatcggcacacagtaccacatcttacgaatgccggggaattgctccagaaatgttctggtgacatactcggtcgtcatttgatattgggcctcataatcaaggtggtacatggacagcttgtccagaaggccctgttcggcggcgtaacgatagcaaagattaagcatgacgccgctgtccttgccacccgaaaaagacaccaggacgttgtcaaactcttggaaacaataggctatgcgttctaaagccgcctcataaacatttttatccagatatgttttcacaacttttccaaagcctgtctttcgccatccgccgccagccccctgccggacgggaacacgtcggcccggatatgattgccggaagccatgcattttccctgaaaccactcttgcagcttgcagctcatagggatatcccctgttctttcaaacagggttgcaacgccttcatttctgcataaataagcaacatcatgttttttcatgttttcaaatgcgcagcagcttatcgtccgttattttccgtcaacaataccaacctactgaattattgcggcgggtcaatgtttttactgcaattatttcagtaattttattgtcatcaccctccttctcaaaatacctgcgctttttagcgagcaacaccattccagaaatgccttatgcattgcgccatgacctcctttccttctccgcaacatccgcgctatgtgcagcattcaagacgctgcgttggaatgcacggttccaaaatcggagatacaaaaatcataacttgcttaaaattaggtgaacgaaaaaatgtacgactcagagccattttccggttccaacatctttcccccaatgctctttccggaaccgcatcttccaggcagacgatacatccatcatttccctcctgaaggaaaaataaccgtgtttccctttttgcaatccgggatgctgtccaaacatgaatatgccggtacacgccttaatcatgccgtcagattagactttaggcgttttatgattttccccgaaacgccaatttcatgccagaacggaatcaaaaaatgacatttagtcagcacttatggttgtttttccgcggtttttcacctttccagcctcaaaacagacaaaaaagaagccctgtaatccattaaaattacagggcttagaaaattagtggctcccccggttgggctcgaaccaacgacctagtgattaacagtcacccgctctaccgctgagctacaggggagtttgcattccatggaacgcggagggatttttactggaggtacgggcgtttggcaagtacttttttactcttgcaggctttttgacgcaaaaaggcttccgcggcgcggtcatggcaacggtgttttcttgacctttgaagggagaatgaccagactttcagcgacatgagtgaacatcaccatcatattgctgtcttggccggcgacggcatcgggcccgaggtcatggcacaggctctgaaggttctggatgccgtaagcggcaagtttggctttaccgtaagccgcaaggaggcatttgtagggggtgcgggcattgaccactgcggcaaggctcttcccgaagaaaccattcgcgcctgcgaagaggcggacgccgttctgttcggctccgtgggcggtcccaaatgggagcatctccccgccaatgaacaaccggaacgcggagccctgctgcctctgagaaaacatttcggcttgtatgccaacctgcgtccgggcgtatgccttccggccttgacccatgcctcccccatcaagaatgaactgattgaaggcggattcgatattttatgcgtccgggaattgactggcggcctgtatttcggccagccccgtttccgcgaacgggagggagacgacgaagtcgtcgtggataccatgcgctaccataaaagcgagatggtgcgcatcgccaaagtggcgttcgaggctgcgcgcggccgccgcaagcgcgtcaccagcgtggacaaagccaatgtgctgaccaattccctgctgtggcgcgagacaatgattgaagtttccaaggattatcccgacgtggaattgctgcatatgtacgtggacaatgcagccatgcagctggtgcgcaatccccgccagttcgacgtgctggtgacggaaaacctgttcggggacattctttccgatgaaatggccatgatttgcggttccctgggcatgctgcccagcgccagcctgtgccagggcgcacaggacaacggcctgttcttcggcctttacgaaccctccggaggctccgctccggatatcgccggcaagggcattgcaaacccgatcgcccagattctttccctttccatgctgttgcgctactccctgggagaaaaaacagcggcagacgccattgactccgccgttcgccgcgtgattgaccagggctgccgcacgggcgacctggctacgggagctcccggagaaatccgcgtgaatacggcggaaatgggtgatgccatcatcgccgccctgtaagcagagccgttcttccggcgccgcaggggaagggacacctgcagcacgcctttcctccggggggagcggtaccgcctcccctccgctttcctctttcatttccgggattttccggttctttatccatctatcatgaacatccttatcatcggccagggaattgccggaagttgtctggcgtgggaattgaaacgccgcggcgcggagtttacggttgcagaccgccccgtagcggaaacggcctcccgggtggcggccggattggtaaaccccctgacgggccgcgccttccgccccggatggaggcaggaagaatgcctggcggcggcagaggccttttacccggagacggaacgggaattaggcgggtcctggtggcagaaaactccgattttccgggaagtggagacggaggaccagtttgaaatctggcaggaacgccagacggctccggaatcctgcgcctatgccggacctctttttccatggccggaacgctgggaaggccgcgggaaagccgcctatacgcgaggttccgccgtgctgcacgtggaaaacatggtcactgccatgcggcgtttttttatggaacagggccgttttgtggaagcggatgtatcccccgcagatatccggccggatgcaaacggtcttttccattggaacggtcgcacgttttcccacatagtctggtgtaccggctgggaagccgggcttcatccggacatgtctccgctgaaggggcgcccctccaaaggaaccattctggacttggacttgaaagagctggactggcatgccggcatcctgcatttcggacactggctggttcataacggttctttctggcgcttcggggccacctacgcgtgggcgtgggatgctcccggcattccggaagcccccgccgtccaggaattgatgctggaccttgttaaacgctattccgggaacatggacgtcatccgcgcccgtgccgccgtccgccccatcatccgccgcagccaaccggtcgccggtcccattcccgggctggacggtcagttcgtcttctccgggctgggcagcaagggggtgaccacttccccctggtccgccgcccagcttgccggacatctcgtgtgcggaacggatctgccgccggatctgctgcctgccgcgctctggaaatgatgcggaacatcagctgtccttccttgaacggaacagctattttccttgtcaaaaggttctgaacgcgattacatgcggcctaatatgcgagcggagaacgagaactggggagatacggtacggaatcatctgtttgaccagcgcagcgccgtcatggtgcactggctgattctgctcaatgtagtcatctttatcctgggattcttcttccaagtggacatcccaaggaatatttacccgcctgtccatttggacttgatccagctttacggagcttacagcgaatatacgtgctttcacgagggggaattatggcggttgcttacctatcagtttcttcacgccaatctggggcacatcatgttcaacatgattgccctgtggtttttcggcccggttgtagaagaacgtttcggccattggcgcttcctgctgtattacctgttttgcggcgtggctgcagccctgttttcctccctgctggggtacatgggattttttgatccggaatggcgcttcattcccatggtgggggcctcaggttccatttacggcatcatggccgcatgcgcggtgctctttccccatgcccgggtacagcttctgtttcctccggttaatttgagcgtgcgccagtttgccctggccgttctcggagtcgccgcagccgtcattatcttccaatggaacaatgcgggcggggaagccggccatctgggcggcatgttcgccggatttattctgacattgctgattttatggaaggaaaagatgtcttccccaagacggaaagccgcctcttcttcccactattcccctgagccttccagccgccgcccggcacaggcttacccctctgaaaaggaggtggatgaaatcatggaaaaaatatccaggtccggcctgtccagcctgacggaggaggaacgggaaattctccggcgcgcttcccggcgctgaactatttgttagatatttttatatttttcgttattttccttcctttttgccatccatttcctagcatggatgaatgatgacgcgactgtattcctccaccgtcctgggcgtagatggcgtagaagtggaggtggaagtggatttccgccccatggcggaaaaacgcacctttattgtcggccttccggatgcggccgtgaaagaaagcgggcagcgcgtggacacggccatacaaaacagcggccttccctttcagcagggtatcttcgtcgttaatctggctccggcggatttaaggaagcagggccccggattcgaccttcccatcgccctgggaatggttgcgggagcggctgaaaaggagatggacgcttctgcctggtgcattgtgggagaactggccctggacggaaccgtacgccccgtgcaaggcattctgccgcaaatcatggaagcgcggcgcatgggcaggaagcgcatcatgctgccgcaagccaatgcctatgaagggctgcccgtgcagggtgtggaaatttatcccgtttcttccctgagagaagcctggcatttgcttacttccgacgccctgccgcctccatttacaggttcagggcgagaggcccatgctccacgggacaaagacgccgctgtggattttgacgaaatcaaagggcagccttatgcacgccgcgccatggagattgcggcggcaggaggccataatatcctgctttgcggctctccggggtccggcaaatccatgctggcgcaaaggctcccgaccattcttccgcctctgagtccggaggaagcgctggagaccagtaaaatccactccgtatgcggtttgctgaaacgggggaacggcctggtggaccagcgtccgttccgggctccccaccacaccatttccgatgccgggctgatggggggaggagcgaatatcacgccgggagaagtatccctggctcacaacggcgtcctctttctggatgaattgccggaattccgccgtgccgctctggaaaccctgcggcagccgctggagaccggccaggtagtcatttcccgcgcttccggcaccatgacatttccgtgccgtttcatgttggcagccgccatgaatccgtgtccctgcggttatctgggagacagaagaagagcctgcacctgccccccggcgcagatcgcacgctaccgccgtaagatttcaggcccgctgctggaccggtttgacctgctgatggaagttcccgccgtggatccctccattctggcttccgcgcctgccggagaatgttccgccagtatccgggaacgcgtgacggccgcacggcggctccagtccagcagatacgcaggaacgcctttccgtaataatgcggccctttccggaaaagcgctccagaagtattgccgtctgctgccggaaggaagggctatcctgctccgcgccgtggaagaactggccctttccgccagagcttatgaccgcattttaaaggtggcccgaaccatagcggatttggaaggaatttctgatattcaggatgtccatttgtatgaagccgtgcagtaccgtgctttcgagcaatcactgagggattagcactatgaatctctctcctttcgcaactaccccaaaaacaaagacatattcccgttccgaaaataaaaaagaggcagcttttcagctgcctcccgaataacgaggatatttactatgaacgtctgcggcgcaacaacatggctcccagacccagcagacccaaagacgctgcggcaggctcgggaaccgtttcataggaaacctgtatacctgtaattgtataagcggaagtagcgcctccagcgccaccgcgtactccggcaactaccttataaccttcctcccaggtaaggggagccgccgacatatccagggaaattgtcgttgtttccgatgtagaggtaaacgaaaagtcctgtatcttggaaagttccccaaccagagtgccggttgaatcatatacggcaagtaccatggaataactgctgattacagaagaaggagtattgcaggaaaatgtaatggaagaaacggaatccccctgctgcggccctccaagaaccatggcaaaggaatccccgctaactccggaacgtccgcacaatgtaatggttcctacattgctctcattcgcccaagtgccttcattatttatcccccaattggaaatggaattgttattgccgccggcatatattccattttgcaagtcctttactttgtccagaagctgttgccccgacgttctcgccatagtggcggtctgtgatacgctttgcgattcaggaagctcagcaacaatcgtagccgcctgggcggacatcatacatacgcaactggctaacaaaacataatgataaactctcataacgctttgcattgattagaggattgttaatccgttgtcaacataaaaagttgaaagagcggtattccggcagtggacttcttttttgatgtaaggactttataaagactaatccttgcgcctcttccattctaacagctgcatgttatttcataaatcattcattattatgaatcgaacgttatcgtaaaccattcatgaagaaaataggtccagcgttttccccatgatggtacggaaagaaaaagagcggattaacaatccgctgtcccttttattcaatcctgacgctaaaggaaaagccgcctcagcaacagtgaggcggctctctccaaaaagaatttttaacgaatagcttccaaagcctgtttgagatccgcaataatgtcttccgcagcttccgtccctacggaaaaccggatgaggtcaggccgtacgcccgcctccatgagctgctcatccgtcaactggcggtgcgtatggctggcgggatggagaacgcaggtacgggaatccgccacatgggtcacgatggcggccagcttcagactatccatgaacttgatggaacgttcacggcctcccttgatgccgaaggttactacgccgcaggactggccacagcggaattgcttctgcgccagttcataatactcattggaagaaagacccggataattaatccaggcaacatcttcctgcccttgcaggaattccgccactttctgcgcattttcacaatgccgcggcacacgcaggtggagggtttccaaacccaagttgagcaaaaaggcattctgcggagactggatggaacccaggtcacgcatgagctggacagtcgccttggtgatataggctcccttgccgaagcttttgctgtaggagagcccgtgataggaggggtccggttccgtcaaacccgggaatttatccttgtgcgcttcccagtcaaagttgccgctgtccacaatcacgccgcccacggcggcggcatggccgtccatgtacttggtggtggagtgggtgacgatatccgcaccccattcaaaaggacggcaattaatgggtgtggcaaaggtattgtccacaatgaggggaacgccgtgcgcatgggcaatgtccgccattttacggatatccagcacgcaaagcgtgggattggaaatagtctccgcaaagaaagctttcgtattggggcggaacgctttggcgatttcctccgccggagcgtcctggtccacgaaagtaacttcaatgcccattttccggaatgtgacggcaaagaggttgtatgtgcccccgtaaatcgccgaagcactgacgatatgatccccagcctcgcaaatattgaaaacggcaaagaaggaagccgcctggccggaagacgtcagaatggcggccacaccgccctccagttcggcaatttttctggcaaccgcctcattggtggggttctggaggcgtgtataaaagaatccggcttcttccagatcaaacaattttgccatttgttcgctggtctcgtacttgaacgtcgtgctctggtaaatgggcaatacgcggggttcgccctttttaggcgcccagcccgcctgcacgcacagggtctccggtctcaattcctgattcatcatgcggggcatgctatgcgatgcctcctgccttgtaaagcagggaaaaccagacgtatggacaaattcgcccctgcccccgccgaagcacactcccggttttttcccagtataaaaccccctgttcccggcaaatcaaccgcaaggacaggggcgttttacctgcgcgcgggataccctacgatcgaatgaaacggcaattcctccgatacctctttcccggaaccaaccgttccccggtgaataaagccgggcatctcactacttgatttccggcaaaggggtggaaatttcctcttccgtcagatagcagccgggatcggacccgtaccagtgtccgttggcaaacgcggcacgggtgcggaagcctccgccgcacagggcgaagtgaacgcagcggccgcaacggccttcaatcttcttctgccgttccagaggatcgtcggaaccgcgcagctcaggcaacatttccgctgcagctccggccctggcatcccataaatcggaaaaccggtcacttttcacattgcccagagtaacggattgccagaactggtccggatgcacggcaccctgtgtgtcaatattggcgatgccccggccggaactgttcgcgccgccgccattccattgaagcaggccgagggtttccttcgccagaggggagccttcccggagctggcgcagaagcaggtaaattccgtccgcaggctgggttacagtcagcacttcacggttttttccctccgctttccattcctctacacgggcaatcagcgtatccatggcattccttgcttcctcctgagtcagggtctgcacttccacgccgcggccagtggggaccagatggtaaaaacagacgcgctggatgtcgttggcgtcaataaaatccaaaatctggcccatgcactgcacattgttgcgggtcagcgtcaggcgcaggcctgtcttttgccccacttcactgcaaagcctgaatccgcgcaccgcctgctcaaaagaaccttccacaccgcggaatttgtcatgaacggcgccaatgccgtccagggaaatgcctacgtacgccacgcccaattccttgaaccgcgctgcagcttccggcgtaatacgggtgccgtttgtggaaatggtcaccttcagcccttttccagtggcacgttccagcagttccataaagcgcggatgcaccagcggctcccctccggaaaaaagtagggcattcaccttgtagtccgccagatcatcaatgaccgcgcaacactggtcccaatccagctctcccttaaatttccgggcagaggcgtctgcataacaatgcacgcatttgagattgcaggtacgcgtaatattccacaccacaatgggcttgcgcgcacgggacgaagccggtgcacaggattccacggcgccccctgcaaaacgaccgtgcccgtggccctgtccgtatctcaaatggtccgcgggctgttccgcccctgtccaaagtctggtaatattaatcatggtgttgtgaaagcctgggctgataagggcaaaggttgtcttccgccatcatgtctccgtaaacggcataagcgcgggaccgggaccctccgcagatggtacggtactcacaccgtccgcatttgccctgcaacgcattgtcatcccggagtttgaggaaaagggggtgcgtgcggtagatttctccagggtcatccgtccggacgtttcctgccgtcatgggaagaaaaccggagggctggatttccccggtatgggaaataaacataatgcctttgccgtcccgggtgggaatggcgcggcgggcgggcttgcttccctgagcgcgggcttcctgaagcgccacgcggcgataatggtgcccttccgtagttttaacgccgaaggatacctcatggcttatcctgctcagttttttccagatggcttccacttcttccgccgcaggcatttcatccatggcggcgcggcctgtgggcaccagaagaaatacgctccacatgcccggcttcattcttttcatcagctccacaaagtcgtcaaattcgcccagtgtgctcttggtgatggtggtgttgatttgcaaatgcatgccggcttccttcgccatttccgcagcccggagagtccgttcatatgtgtgggggacgccgcggaaggcgtcatgggtgctctcatgcgcgccgtccaggctcaatgacatgctctggactccagcttctttcaatgcacggaaatccgtgtgcagcagccgggcggtagcagccgggctcaatgctacatgcagccctttgccggaagccgcacggaccaattccagaatatccggcctcatgaccgggtcgccgcccgtcagcaccagcatgggaggccgcagttccgccaactggtcaatcaggcgcaatgcctcctcatgagtcaattcatccgggtgcggacgcggctgggcgacagcgcggcaatgcctgcacgcaagtgcgcaagcgcgcgtcacttcccagaagaccaggaaggggcgttcattgagatctgtttcactaaaaaccgggcgcatttttcaggacagccaatttagaacaattataattttttgaccagcccaaaaggacgcatcctttaaaaagttcacttagccgcctcttcacggattttctgaacttccttaggtaattcggaaagggaattcactgcttccttcaggttcttggaagcatccggagaaagcatgatggccgtcacatgcttgacaatgggttgcatcatttccacaagctgctgctgtactcccatcagcttggcctgctggttgcgggtgaggggcggcaggacggcctgtttcctggcaacgtccagcaaagccgcccggtaacggcctatctgttccacagcagccttgctggtttcctcatcccttaccttggccagggaatcatcaagctttttgacttcatccacagttttgaccagcagggtttcatgagtattgccctctgcatcctccgggaacggctccgcctgctcagccttgtcccgggaaacctgcgccagctccgtctgaacagaccgcaaatccgtcagggctttttgcaaatcgggcgtaaacagtccttccttttttaaacgggccagggattttaccaattcgtcggaaattttctgcacttccgtcatctgggcagaaacctgagcctgctcctggagtgtggcaccgggaagttccagctgcctttttccaagatccagcagttttttgtgcacttttttaactgtttccacagcagcggcagctccgggttcatccgtcaccttatccaaggctgccgtaatttcatgcatgctggcaacgctctgtctggtcagggaaagatgggagtcctgggcaaatgagggagctgttatgcaaacggcagcgcccaagccaatgaaagcagcggttttattcataatatggaagcctttccggcatggaagaatatgttttcctcccttccccgtcaatggcggctattgtcagagccacggtatgaaaaaaggactgtccgcaagcaagcggacagtccttttgaaattttaacagcccggccttagtcacgctgctggcgtgaatacttgtagtagctctggaagccgagttccgcagggaattcgctcagaccgccattgggattgtattccttaaggccgctcatgccgcaacgtccctgataaggaggcttgtacgtgcatttgtaagtgggagcccagaaggtgacaagttcatagattccgtagcccatgcgctcaaacatggtcgcggtgccatcaacaatgcctacggaaaaaccggcataatccccctcgcggctcgtccagttgatgattcccagcgggatttcttcaacggaataaataaggttggcgatggcgcggcccagcttgcgggtgggggtgtattcggaagcggggggagcctgaatgtccgcactggcaacgccaaggacgccggcggcaaaaagagctgagatgatggcacgtttcatactgattgtttatatagtataatttgtcgaggaaaagcaactcaaaaaaacagaaaatcaatctgactccggccgggggtcacgcgtcatgagttccgcaagtgcttccataggaggtttggactcataaagaacggaataaacggcgtcaatcaggggcgtcctcacctccagcttccgcgcaatttcatagacggatagcgtgttgggcaccccttccgccaccatgcccagggtatccaggatttcctggaggctcttcccttccgccagtctccgccccaccgtctggttgcgggagtggcgggaatagcaggtaacaatcaaatcgcctactccggaaaggcccatgaaggtttccctgcggcctccgctggccacgccgatgcgcgtcatttccgccaggccgcgggtcagcaaagcggcctgggcgttatcccccaggttcagcccttcgcataagccggccccgatggcaaagacgttcttaatggttccgcccagctgcatgccgataatgtccgtagcggaataaacacggaaggttttggatgcaaatatctgctgcacccaatccgcatacttcggatcttcaaatccaatcagggaggcggacggaaggcccaggcagatatcttccgcatgattgggaccggaaagcacgcctatggggttggagggcagatattcctgaaggatttccgtcattcttttatgggttccctgttcaatgcccttggtgcaggagacaatgacggcatccggctgcaccggcaggctgcgcagccgctgggccacggaacgcatggccacggaaggtaccactactacaatgagttccgcatccttcacctggcccagatcgcaagtaggatggatattgggggccaggggaagggcggttttcgaaaggacggggctgcgtcttgtttcggcaagctgcctggcctgagcctcttccggcgtccacaggacgacttcacattcccgggtcgccagaaccatggagagggccgtgccccaggaaccggctccaatgactgctattttatgtaaccgattcatcatcttacttggactttttggaatagaaggagtgctccgttccgttgagaagccttgcgatattggaacggtgcttgagaatcaccagtgcgcctaccaccgtgaaaaaggcgacgtaaagtatctggggggagacatccccgtcctggcaaagcggataaatccaccatccggcggcgatcatcaccacagcggccaccaggctggccagggacacgatgccggagattcccataaccaccagccaagaagccagagctacgcaagccaccaccggattgagggcaaataaaacccccgcggttgtcgctacgccttttcctcccctgaatcccaggaaacaggtgtaagtatgaccgagtataacagcgaaacaggagagaactaccaagacattgaaatcccagccgcccgcatcccccgtcaggaacggcagccagttcaaggcgccgaacacagggatgaacccctttaagaagtccagaatgaaaacggaaaggccccacttccagcccagtacgcgccacgcattggtagcgcctatgttgcgggaaccctgctgcctcaggtcaatccctctgattctgccggcaaggtagccgaacggaatcgctccgatcaggtaatagaaaactatccaggcaatcatgttgtgcggagtgcattttaatcccccgccggtcaaatgacaatggggaaatcacctccggcccggttctttccggaggggttgctcccgtaaaagaacaccatacctgacagcctcctccagatcctcattttcaaggctctccgtgccccggtctgcggaaaagccctgtttaaggcgcaataagaacagcgcgaacattttcccgcccgcccagaaccatgctcccgcacttccttcgccggaataagcttatttaccgccctcgcagggtttccgcatgacggcagcccagacggaggcattatcctgctggggctccagcatatccttcacctgttccataatgatccccaccagctccctgctggaacaatccctggccttttgaagagccaggaaagaaggttctctcaacagctcgctccaaacctgcaagccatccgagcatgccagcaccgcatctcccggatgcaggagcaggggcatggcgctgatgtccaccagttccatgggacctcccataacggcggaacggagaatgcaacgctgccgaagcgcaccctgaagtgacattttccccttccggtaaaggcaatccgcaatcggtctcatggaatggtcttcattcagacggtccatgcgaaagctgtccgctccgctccataaatacaggggggagtctcccacgctgatccaccacaggaaatggtcgcggatgaagacggccagcaatgtggttccggattcctccggttccttctgaatggcggccaacgccctgttggcagcatgcaaagccgccgttaaacgttccgggatatcctcgatgccgctttccgcaaataccgcagcaaattcctgcgccaccacacaggaggcgcaatctccgcgaagatgccctcccatgccgtcgcacacgatgcccagcatcccgccggcggcgggaagacttttaaccacgtcttcctgctcgcggcgtttgccgatccattgggcggaagcgcagtccagaatatccggggtgcggggagccatgcggccggtggttcggattaactgtccttacgtttcaactgcgggaagagcagcacgtcacggatggaagaggcccccgtcagcatcatgacgacgcggtcgatgccgatgccgatgccgcctgcggagggcattccgtattccagcgtttcaatgaaatcatagtccacacgctgggtctccccggcagcctggtgctccaggcgttccttttgcacgtcaggatcgttcaattccgaatagccgggggaaatttcctgcccgttgatcaccagttcatatacatccactacgtccggattttcccggttcagcttggccaggggaaccaagtccttggccacgtgggtaacaaagcaggggttcatggtcttttcctccaccagtttttcatacacctgctgggaaacatccacatctttcatatccgggctgatttccactcccagctcttcacagcgggcgcggcgcgcttcgggggaaatgtcaaaccagtcttcccccgccacgccccggatcaggtcctggtagtcggcgcgtttccagggacggctgaggtcgattgtgtaaagaacattgccttcagcgtccttgtggtcaatctgaaggccgccgcagaatttttccgccagatggcagatgagctcctccaccatattcgccatggtttcaaaatcaccgcaggcgcaataggcttccagcatggtgaattccgggttgtggcggcggtcaattccttcattgcggaagctgcggttgagttcgaaaattttcgtgaagccgcccaccatcaggcgtttgaggaaaagctccggggcaatgcgcagcgtcagcggcatatccagcgcgttatggtacgtttcaaacggcttggcggcggccccaccggccacatcctgaagcatgggggtttccacttccagataaccgcgttcctggagaaagcggcggatttccgcaatcatgagggagcgcgtcacgaacagggaggcgctttcctcattggaaatgaggtccaggtggcgcttgcggtaggtcacctccttgtccgccagcccgtgccacttgtccggcagggggcggaggcttttggaaagaatggtcagtccggatacctttacggtaggttctccggtacgggtcaggaacgtggttcccctgatgccgacccagtccccgcggtccaggagcttccaaagcttccaggtggtttcatccacctcatttttatgcaggaacccctggatttttccccgtacgtccccaatgacgaaaaactgggatttgcccatgtcgcgaatagccagaaggcggccggcgacggctacctgtttgtcttcctggaaatcggctttcaatccggcgggagtggtggtcacgtcaaatcttgcgccgtaggggtcaattcccagctcacggattttggcgagcttgtcgcggcgcacggcaataagttcggattccgtcgtagtcggatgtgcctgctgttgttcggacatagtgcggggattctaaaggcttgcttccgttttggctagcgcattgtcaggcagaggggacatttttggcggccggttttgacccgaaggttcctcccccccctttttcggaagccggacgccggaacatgccccagtattccggccgttttgcaaaaagcctggacagaaccacataaagcacgatattcaaaggaattgaaacaaaactggtcttattattaaaaaatggccggcaaatccccacatacgcataattgcttttacctttggcaccagacatgttataaatgttcccgttaagacgcaccttatttatcaattatatactatccgtgcagacttatgagtgatcagacaaccgtaacttacagcacgattgacgctaacgaagccgtagcctccgtagcctatcgtttttctgaagtcattgccatttaccccattacaccatcttctccgatgggtgaatcagctgaaagctgggccgctgtcaacaggaagaacctgtggggcaccgttccctccgtagtggaaatgcagagtgaaggcggcgcggcaggcaccgttcacggcgccctccagaccggagcgcttgcaactacgttcaccgcatcccaggggctcctgctgatgatcccgaacatgttcaaaatcgcaggggaactgactcccgccgtgttccacgtagccgcccggtccctggcttaccaggccctttccatttttggcgaccacagcgacgtgatgagcgcccgctcctgcggatgggccatgctgtgcggctcctccactcaggaagctgcg

SEQ ID NO: 8 - DNA, 3216 bp, synthetic construct
  source 1..3216: mol_type = other DNA
gaaaaaagagcctcccggcaaaccaagggctaaaaatccagggcggccattccacggaagaaacagccgccccaggactggcggacaccacccggcggaaaacttcccgatgccatccgttatttccagattacttcaaaaatatttacggaacttcccttcttcccggtcaggccgagggccttcaccggttttttgacggatttcaggctgaacgtattcactttcctgcccttggccaaattgcccacgggaacccaccgtccgtcagccccacaggccagcacggaagcctccttcccgtcggacaggacaatgacggaacccgcacggggaaaatcacagggaatctccgtcctctccggagacagttccaccgggaggaacgttgccaggttgaaatccccggcagctccgctgtcggcggacttcccacccttgttggcaagattcagccggaactcttccagagtcacctcctgcggggaggaggaggcgttcaacagcctgatgcccttgatcactccgccaatatccgcggaaccgtcctccttcaacggaacctccgcccaggactttccatccatggaaatgaacaacttggcccacttcatatccggcgtcttcaaattgacggaggcggactccacggacactcccgccggaatttgaaggcccagggactttttcggcggcaggggatgcacctccatgatgcgcttcaaggaaatatccctgtctcctgcttcaaccacggcattcctgaacgcgggagcatccgtcagtacggaaggcgctgcaggagcattcaccttgaaatcccggatggccgtccacacgtccggcttgcctcccggaaccccctgcgccgtagcgcggtaacgcacaaaccggccttttttgccatttccccggtactccacgcgaagcccgctggactccggcatcaggggagaccaggactgcccgtccagggaaacctccaattgtcccctgttcacagcgtccgtatcggaatcattgcggcccatcacaatggaaacggtgcgtatctcccgtggaactcccaggtccacgccgaaaaagtcacccttcttctgaacctctttgcagtaatagaacgactcggggtcgtcatccagcatcttctcgatgccaatcttggacttggtggaaacataaggcttcacacggccaacggcctgcccgctcacgcgggaaagcacgggggtggagcccatgtccagcagttcccgcacagcgggggccatcaccaattcggacggcttcacggcggtttgccacggggaattcttcttggtcacttccgtgacgtgcttattgatggccttgctgatttccctgctgtaacgctgcatctcggcaagcaggcaggcggcctccatggcatgattcagcgctccggcggcattccccgcctctgtggcctcaaccatgcgcatactgttcaccccggctttccccagggattcgaactggatgagccacggctccacctctgcaacgaaagcgggattattagacttggcccgaattgcggccggagcttgggctatcttcgcgaactcggccttcaggcggtcaaacgccttgcttccggacaccctggccccgcggcggcacagctccagcacctgctccaccacgggggcaatctctacggactcctctttgcggtaattgtgcccgctgggccccccgtcgctattatgatcggcaaacgtctgcatggcggaggagcagccggggaacaaaatacggatgctgtccttccatgtcctgtcggaatcataagccttggcgttccaggtcatgttcgccacgctgaacagggaaatcttggaagcctccggcttatccatcggattggaagcaaacccctgcataaacggcatcgcgtccgcatccacgccataggtgcgccccaaaaacagggcatggcgcacgtaatccgtcaccgggaaattccaccagataaacgccggacgcttcaaatacttattaatccccttcaaagcaggagtccggatatcgctcacaatgctggaaccggtccacatgatgcctatatccttgtccagatgttcccccattacctcatggtagcggctaccaccgccggaatacgccgtggggcatacgatcaacggcgtcacatccggttttttgtggataaactccttattcaggtaattcaaaaactccacctggccctccggtttggccccctctccgccgatgtcgtcaaaaaatacggcaaaggaacggaatcccagatcatacatcatctcaaacttcttcacggccgccttccggtccgcctcgccccagtgaatatccgctccgggatgcacggcccagacaaaattcaccttattctgcttcgcgaccttcaccagctctttcaggtccttcgccatatctgcgggataaggctcgcgccagcgcttggaaaaaccgtggaacacgtcatccttcgggccgtagatgtaagtattcatcttatacttcccgtaaaatttgaactggctgatgcgaccttcctgcccccagggcagaccgtaaaacccttcaatggtaccgcggaaaggaacatccggccaatccaggacctccacttccggcactgtcacgccggaagaagtcttctccgccaactgcagcagcgtctgggccgcgtaaaacaggccttcgtcgtcataccccgtcatccgtattccctggggcgtaacgctcagggaataggccccggccttccggggaacattaccggcaggcttgttgcttcctttgatgatcgtcatctgcacaggcagcccgtttggagcgagggaaaacatgcttttcagggcattcacggtaggttcatcccgcgcgcccaacagcttcagggccggaaccgtcacggaaccgccgctcctggtcatcttctgaggaatgggatacaccggcatcttggccgtttttccggcacgggagccttcaggagaggcggaaaaagccggagaagaagactgggcagaaacaggaagggcaaggccggccccgagcgcggcggcagccatcatggattggaaaagtatcagattcatacgtgcaaaaataaaaagcctgtacaggccaggttcacgaaactacgcccggattgttccacttctaacaggctcctctccgtatgtcaaaatactttgcccc

SEQ ID NO: 9 - protein, 838 aa, Akkermansia muciniphila
MHLHDALQGNIPVSCFNHGIPERGSIRQYGRRCRSIHLEIPDGRPHVRLASRNPLRRSAVTHKPAFFAISPVLHAKPAGLRHQGRPGLPVQGNLQLSPVHSVRIGIIAAHHNGNGAYLPWNSQVHAEKVTLLLNLFAVIERLGVVIQHLLDANLGLGGNIRLHTANGLPAHAGKHGGGAHVQQFPHSGGHHQFGRLHGGLPRGILLGHFRDVLIDGLADFPAVTLHLGKQAGGLHGMIQRSGGIPRLCGLNHAHTVHPGFPQGFELDEPRLHLCNESGIIRLGPNCGRSLGYLRELGLQAVKRLASGHPGPAAAQLQHLLHHGGNLYGLLFAVIVPAGPPVAIMIGKRLHGGGAAGEQNTDAVLPCPVGIISLGVPGHVRHAEQGNLGSLRLIHRIGSKPLHKRHRVRIHAIGAPQKQGMAHVIRHREIPPDKRRTLQILINPLQSRSPDIAHNAGTGPHDAYILVQMFPHYLMVAATTAGIRRGAYDQRRHIRFFVDKLLIQVIQKLHLALRFGPLSADVVKKYGKGTESQIIHHLKLLHGRLPVRLAPVNIRSGMHGPDKIHLILLRDLHQLFQVLRHICGIRLAPALGKTVEHVILRAVDVSIHLILPVKFELADATFLPPGQTVKPFNGTAERNIRPIQDLHFRHCHAGRSLLRQLQQRLGRVKQAFVVIPRHPYSLGRNAQGIGPGLPGNITGRLVASFDDRHLHRQPVWSEGKHAFQGIHGRFIPRAQQLQGRNRHGTAAPGHLLRNGIHRHLGRFSGTGAFRRGGKSRRRRLGRNRKGKAGPERGGSHHGLEKYQIHTCKNKKPVQARFTKLRPDCSTSNRLLSVCQNTLP

SEQ ID NO: 10 - protein, 997 aa, Akkermansia muciniphila
MNLILFQSMMAAAALGAGLALPVSAQSSSPAFSASPEGSRAGKTAKMPVYPIPQKMTRSGGSVTVPALKLLGARDEPTVNALKSMFSLAPNGLPVQMTIIKGSNKPAGNVPRKAGAYSLSVTPQGIRMTGYDDEGLFYAAQTLLQLAEKTSSGVTVPEVEVLDWPDVPFRGTIEGFYGLPWGQEGRISQFKFYGKYKMNTYIYGPKDDVFHGFSKRWREPYPADMAKDLKELVKVAKQNKVNFVWAVHPGADIHWGEADRKAAVKKFEMMYDLGFRSFAVFFDDIGGEGAKPEGQVEFLNYLNKEFIHKKPDVTPLIVCPTAYSGGGSRYHEVMGEHLDKDIGIMWTGSSIVSDIRTPALKGINKYLKRPAFIWWNFPVTDYVRHALFLGRTYGVDADAMPFMQGFASNPMDKPEASKISLFSVANMTWNAKAYDSDRTWKDSIRILFPGCSSAMQTFADHNSDGGPSGHNYRKEESVEIAPVVEQVLELCRRGARVSGSKAFDRLKAEFAKIAQAPAAIRAKSNNPAFVAEVEPWLIQFESLGKAGVNSMRMVEATEAGNAAGALNHAMEAACLLAEMQRYSREISKAINKHVTEVTKKNSPWQTAVKPSELVMAPAVRELLDMGSTPVLSRVSGQAVGRVKPYVSTKSKIGIEKMLDDDPESFYYCKEVQKKGDFFGVDLGVPREIRTVSIVMGRNDSDTDAVNRGQLEVSLDGQSWSPLMPESSGLRVEYRGNGKKGRFVRYRATAQGVPGGKPDVWTAIRDFKVNAPAAPSVLTDAPAFRNAVVEAGDRDISLKRIMEVHPLPPKKSLGLQIPAGVSVESASVNLKTPDMKWAKLFISMDGKSWAEVPLKEDGSADIGGVIKGIRLLNASSSPQEVTLEEFRLNLANKGGKSADSGAAGDFNLATFLPVELSPERTEIPCDFPRAGSVIVLSDGKEASVLACGADGRWVPVGNLAKGRKVNTFSLKSVKKPVKALGLTGKKGSSVNIFEVIWK
